(19) United States
(12) Patent Application Publication
(10) Pub. No.: US 2010/0105062 A1
(43) Pub. Date: Apr. 29, 2010

(54) Genetic Markers for Optimizing Treatment for Schizophrenia

(75) Inventors: Mark David Brennan, Jevversonville, IN (US); Timothy Lynn Ramsey, Shelbyville, KY (US)

Correspondence Address: FISH & RICHARDSON PC, P.O. BOX 1022, MINNEAPOLIS, MN, 55440-1022, US

(73) Assignee: SUREGENE LLC, Louisville, KY (US)

(21) Appl. No.: 12/612,582

(22) Filed: Nov. 4, 2009

Related U.S. Application Data
(63) Continuation of application No. PCT/US2009/005318, filed on Sep. 25, 2009.
(60) Provisional application No. 61/100,176, filed on Sep. 25, 2008.

(51) Int. Cl. C12Q 1/68

(52) U.S. Cl. 435/6

(57) ABSTRACT

This document provides methods and materials related to genetic markers for predicting response to a treatment for schizophrenia (SZ). For example, methods for using such genetic markers to select optimal treatments are provided.

### CLAIM OF PRIORITY

[0001] This application is a continuation of International Patent Application No. PCT/US2009/005318, filed Sep. 25, 2009, which claims priority to U.S. Provisional Application Ser. No. 61/100,176, filed on Sep. 25, 2008, which are incorporated by reference in their entirety herein.

### FEDERALLY SPONSORED RESEARCH OR DEVELOPMENT

[0002] The U.S. Government has certain rights in this invention pursuant to Grant Nos. R43 MH078437, N01 MH900001, and MH074027, awarded by the National Institutes of Health.

### TECHNICAL FIELD

[0003] This invention relates to genetic markers that are associated with response to treatments for schizophrenia (SZ) or schizophrenia spectrum disorders (SSDs), which includes SZ, schizotypal personality disorder (SPD), and schizoaffective disorder (SD). For example, this document provides methods for using such genetic markers to stratify patient populations in order to select optimal treatments.

### BACKGROUND

[0004] The schizophrenia spectrum disorders include schizophrenia (SZ), schizotypal personality disorder (SPD), and/or schizoaffective disorder (SD). Schizophrenia (SZ) is considered a clinical syndrome, and is probably a constellation of several pathologies. Substantial heterogeneity is seen between cases, which is thought to reflect multiple overlapping etiologic factors, including both genetic and environmental contributions. SD is characterized by the presence of affective (depressive or manic) symptoms and schizophrenic symptoms within the same, uninterrupted episode of illness. SPD is characterized by a pervasive pattern of social and interpersonal deficits marked by acute discomfort with, and reduced capacity for, close relationships as well as by cognitive or perceptual distortions and eccentricities of behavior, beginning by early adulthood and present in a variety of contexts.

[0005] Various genes and chromosomes have been implicated in etiology of SZ. Many studies have suggested the presence of one or more important genes relating to SZ on most or all of the autosomes (Williams et al., Hum. Mol. Genet. 8:1729-1739 (1999); Fallin et al., Am. J. Hum. Genet. 77:918-936 (2005) ; Badner et al., Mol. Psychiatry. 7:405-411 (2002); Cooper-Casey et al., Mol. Psychiatry. 10:651-656 (2005); Devlin et al., Mol. Psychiatry. 7:689-694 (2002); Fallin et al., Am. J. Hum. Genet. 73:601-611 (2003); Jablensky, Mol. Psychiatry. 11: 815-836 (2006); Kirov et al., J. Clin. Invest. 115:1440-1448 (2005); Norton et al., Curr. Opin. Psychiatry 19:158-164 (2006); Owen et al., Mol. Psychiatry. 9:14-27 (2004)). However, none of these prior studies have used high resolution genetic association methods to systematically compare genes involved in response to treatments for SSD, e.g., using anti-psychotics. Neither have any of these studies demonstrated that genetic polymorphisms in the genes defined herein are important in response to anti-psychotics.

[0006] Due to the severity of these disorders, especially the negative impact of a psychotic episode on a patient, and the diminishing recovery after each psychotic episode, there is a need to more conclusively identify individuals who will respond best to specific therapies, and/or who is likely to suffer the most severe side effects, to determine appropriate therapies based on genotypic subtype.

### SUMMARY

[0007] This disclosure provides methods of identifying, selecting, and administering optimal treatments for SZ or SSDs, based on the presence of variations in genes involved in a number of pathways including: glutamate signaling and metabolism, cell adhesion, cytoskeletal architecture, vesicle formation, and trafficking, G-protein coupled receptors, carrier proteins and transporters, cell cycle modulators, neuronal development, calcium/calmodulin signaling, neuropeptide signaling, and several additional genes identified by virtue of their interaction with genes in high impact pathways and their expression in the central nervous system. This disclosure provides methods and claims relating to predicting treatment response (e.g., efficacy and likelihood of side effects) for these conditions based on their underlying genetic architecture. As described herein, methods for predicting response in order to select optimal treatments include evaluation of SNPs for genes relating to response to treatments for SZ. In some embodiments, specific exemplary SNPs are given that can be used to capture significant allelic variation in these genes. The allelic and genotypic variants thus identified can be used to stratify a patient population in order to select optimal treatments (e.g., atypical antipsychotics, typical antipsychotics, antidepressants, lithium) for patients.

[0008] In one aspect, this document features methods for predicting a human patient's likely response to a treatment for schizophrenia (SZ). Methods can include determining the identity of an allele of at least one polymorphism listed in Tables 1-20, wherein the presence of an allele associated with a known response indicates the patient's likely response to the treatment.

[0009] In another aspect, this document features methods for selecting a treatment for schizophrenia (SZ) for administration to a human patient. Methods can include determining the identity in the subject of an allele of at least one polymorphism listed in Tables 1-20; comparing the identity of the allele in the subject to a reference allele of the same polymorphism, wherein the reference allele is associated with a known response to a treatment, e.g., an allele listed in one of Tables 1-20; and selecting a treatment if the allele in the patient is the same as a reference allele that is associated with a positive response to that treatment. A treatment can be administration of an antipsychotic medication, and the at least one polymorphism can be selected from the markers listed in Tables 1-20. In some embodiments, the antipsychotic medication can be olanzapine, and the at least one polymorphism can be selected from the markers listed in Table 1 (e.g., nucleotide 31 of SEQ ID NO:2971, 2019, 684, 1109, 1336, or 2256), 6 (e.g. SEQ ID 4414, 3296, 3298, 1853, or 2390), Table 11 (e.g., nucleotide 31 of SEQ ID NO:2813, 4603, 3746, 1309, or 1588), or Table 16 (e.g., nucleotide 31 of SEQ ID NO:1197, 1717, or 248). Tables 1, 6, 11, and 16. In some embodiments, the antipsychotic medication can be risperidone, and the at least one polymorphism can be selected from the markers listed in Table 2 (e.g., nucleotide 31 of SEQ ID NO:27, 3878, 882, or 882), Table 7 (e.g., nucleotide 31 of SEQ ID NO:1439, 4213, 457, 2394, or 1571), Table 12 (e.g., nucleotide 31 of SEQ ID NO:4598, 559, 914, 4340), or Table 17 (e.g., nucleotide 31 of SEQ ID NO:1895, 22, 3078, 23, or 4573). In some embodiments, the antipsychotic medication can be quetiapine, and the at least one polymorphism can be selected from the markers listed in Table 3 (e.g., nucleotide 31 of SEQ ID NO:4571, 2383, 3737, 694, or 795), Table 8 (e.g., nucleotide 31 of SEQ ID NO:695, 2162, 574, or 4414), Table 13 (e.g., nucleotide 31 of SEQ ID NO:56, 1416, 1835, 3201, or 2445), or Table 18 (e.g., nucleotide 31 of SEQ ID NO:1292, 1291, 745, 746, or 3528). In some embodiments, the antipsychotic medication can be perphenazine, and the at least one polymorphism can be selected from the markers listed in Table 4 (e.g., nucleotide 31 of SEQ ID NO:48, 3715, 2829, 3869, or 2240), Table 9 (e.g., nucleotide 31 of SEQ ID NO:4282 or 2409), Table 14 (e.g., nucleotide 31 of SEQ ID NO:2634, 3312, 2797, 1665, or 4250), or Table 19 (e.g., nucleotide 31 of SEQ ID NO:507, 3077, 3303, 1508, or 307). In some embodiments, the antipsychotic medication can be ziprasidone, and the at least one polymorphism can be selected from the markers listed in Table 5 (e.g., nucleotide 31 of SEQ ID NO:3092, 3424, 62, 297, or 2618), Table 10 (e.g., nucleotide 31 of SEQ ID NO:1787 or 788), Table 15 (e.g., nucleotide 31 of SEQ ID NO:1711, 4425, or 2159), or Table 20 (e.g., nucleotide 31 of SEQ ID NO:3475, 1738, 2429, 2538, or 3589).

[0010] Determining the identity of an allele can include obtaining a sample comprising DNA from the subject, and determining identity of the nucleotide at the polymorphic site. Determining the identity of the nucleotide can include contacting the sample with a probe specific for a selected allele of the polymorphism, and detecting the formation of complexes between the probe and the selected allele of the polymorphism, wherein the formation of complexes between the probe and the test marker indicates the presence of the selected allele in the sample. Determining the identity of an allele can include determining the identity of a nucleotide at position 31 of one of SEQ ID NOs: 1-4617. Methods can further include selecting or excluding a subject for enrollment in a clinical trial based on the identity of the allele. Methods can further include stratifying a subject population for analysis of a clinical trial based on the identity of the allele in the subjects. Methods can further include administering the selected treatment to the subject.

[0011] A response can be selected from the group consisting of a change in a PANNS score; length of time until a discontinuation of therapy; likelihood of discontinuing therapy due to lack of efficacy; and likelihood of discontinuing therapy due to a serious adverse event. A positive response can be a decrease in a PANSS score relative to baseline; a long time until discontinuation of therapy; a low likelihood of discontinuing therapy due to lack of efficacy; and a low likelihood of discontinuing therapy due to a serious adverse event. Methods can further include recording the response allele in a tangible medium. A tangible medium can include a computer-readable disk, a solid state memory device, or an optical storage device.

[0012] Unless otherwise defined, all technical and scientific terms used herein have the same meaning as commonly understood by one of ordinary skill in the art to which this invention pertains. Although methods and materials similar or equivalent to those described herein can be used to practice the invention, suitable methods and materials are described below. All publications, patent applications, patents, and other references mentioned herein are incorporated by reference in their entirety. In case of conflict, the present specification, including definitions, will control. In addition, the materials, methods, and examples are illustrative only and not intended to be limiting.

[0013] The details of one or more embodiments of the invention are set forth in the accompanying drawings and the description below. Other features, objects, and advantages of the invention will be apparent from the description and drawings, and from the claims.

### DETAILED DESCRIPTION

[0014] Described herein are methods for predicting response to treatments for SSDs (and optionally stratifying patient populations), e.g., in order to select optimal treatments, based on evaluation of single nucleotide polymorphisms (SNPs) for genes on chromosomes 1-22. As described herein, bioinformatic and genetic analyses provided evidence of association of the disclosed SNP alleles associated with response, e.g., efficacy (positive response) or the occurrence of side effects to certain treatments for these disorders.

### DEFINITIONS

[0015] As used herein, an “allele” is one of a pair or series of genetic variants of a polymorphism at a specific genomic location. A “response allele” is an allele that is associated with altered response to a treatment. Where a SNP is biallelic, both alleles will be response alleles (e.g., one will be associated with a positive response, while the other allele is associated with no or a negative response, or some variation thereof).

[0016] As used herein, “genotype” refers to the diploid combination of alleles for a given genetic polymorphism. A homozygous subject carries two copies of the same allele and a heterozygous subject carries two different alleles.

[0017] As used herein, a “haplotype” is one or a set of signature genetic changes (polymorphisms) that are normally grouped closely together on the DNA strand, and are usually inherited as a group; the polymorphisms are also referred to herein as “markers.” A “haplotype” as used herein is information regarding the presence or absence of one or more genetic markers in a given chromosomal region in a subject. A haplotype can consist of a variety of genetic markers, including indels (insertions or deletions of the DNA at particular locations on the chromosome); single nucleotide polymorphisms (SNPs) in which a particular nucleotide is changed; microsatellites; and minisatellites.

[0018] Microsatellites (sometimes referred to as a variable number of tandem repeats or VNTRs) are short segments of DNA that have a repeated sequence, usually about 2 to 5 nucleotides long (e.g., CACACA), that tend to occur in non-coding DNA. Changes in the microsatellites sometimes occur during the genetic recombination of sexual reproduction, increasing or decreasing the number of repeats found at an allele, changing the length of the allele. Microsatellite markers are stable, polymorphic, easily analyzed and occur regularly throughout the genome, making them especially suitable for genetic analysis.

[0019] “Copy number variation” (CNV), as used herein, refers to variation from the normal diploid condition for a gene or polymorphism. Individual segments of human chromosomes can be deleted or duplicated such that the subject's two chromosome carry fewer than two copies of the gene or polymorphism (a deletion or deficiency) or two or more copies (a duplication).

[0020] “Linkage disequilibrium” refers to when the observed frequencies of haplotypes in a population does not agree with haplotype frequencies predicted by multiplying together the frequency of individual genetic markers in each haplotype.

[0021] The term “chromosome” as used herein refers to a gene carrier of a cell that is derived from chromatin and comprises DNA and protein components (e.g., histones). The conventional internationally recognized individual human genome chromosome numbering identification system is employed herein. The size of an individual chromosome can vary from one type to another with a given multi-chromosomal genome and from one genome to another. In the case of the human genome, the entire DNA mass of a given chromosome is usually greater than about 100,000,000 base pairs. For example, the size of the entire human genome is about 3×10⁹ base pairs.

[0022] The term “gene” refers to a DNA sequence in a chromosome that codes for a product (either RNA or its translation product, a polypeptide). A gene contains a coding region and includes regions preceding and following the coding region (termed respectively “leader” and “trailer”). The coding region is comprised of a plurality of coding segments (“exons”) and intervening sequences (“introns”) between individual coding segments.

[0023] The term “probe” refers to an oligonucleotide. A probe can be single stranded at the time of hybridization to a target. As used herein, probes include primers, i.e., oligonucleotides that can be used to prime a reaction, e.g., a PCR reaction.

[0024] The term “label” or “label containing moiety” refers in a moiety capable of detection, such as a radioactive isotope or group containing same, and nonisotopic labels, such as enzymes, biotin, avidin, streptavidin, digoxygenin, luminescent agents, dyes, haptens, and the like. Luminescent agents, depending upon the source of exciting energy, can be classified as radioluminescent, chemiluminescent, bioluminescent, and photoluminescent (including fluorescent and phosphorescent). A probe described herein can be bound, e.g., chemically bound to label-containing moieties or can be suitable to be so bound. The probe can be directly or indirectly labeled.

[0025] The term “direct label probe” (or “directly labeled probe”) refers to a nucleic acid probe whose label after hybrid formation with a target is detectable without further reactive processing of hybrid. The term “indirect label probe” (or “indirectly labeled probe”) refers to a nucleic acid probe whose label after hybrid formation with a target is further reacted in subsequent processing with one or more reagents to associate therewith one or more moieties that finally result in a detectable entity.

[0026] The terms “target,” “DNA target,” or “DNA target region” refers to a nucleotide sequence that occurs at a specific chromosomal location. Each such sequence or portion is preferably at least partially, single stranded (e.g., denatured) at the time of hybridization. When the target nucleotide sequences are located only in a single region or fraction of a given chromosome, the term “target region” is sometimes used. Targets for hybridization can be derived from specimens which include, but are not limited to, chromosomes or regions of chromosomes in normal, diseased or malignant human cells, either interphase or at any state of meiosis or mitosis, and either extracted or derived from living or postmortem tissues, organs or fluids; germinal cells including sperm and egg cells, or cells from zygotes, fetuses, or embryos, or chorionic or amniotic cells, or cells from any other germinating body; cells grown in vitro, from either long-term or short-term culture, and either normal, immortalized or transformed; inter- or intraspecific hybrids of different types of cells or differentiation states of these cells; individual chromosomes or portions of chromosomes, or translocated, deleted or other damaged chromosomes, isolated by any of a number of means known to those with skill in the art, including libraries of such chromosomes cloned and propagated in prokaryotic or other cloning vectors, or amplified in vitro by means well known to those with skill; or any forensic material, including but not limited to blood, or other samples.

[0027] The term “hybrid” refers to the product of a hybridization procedure between a probe and a target.

[0028] The term “hybridizing conditions” has general reference to the combinations of conditions that are employable in a given hybridization procedure to produce hybrids, such conditions typically involving controlled temperature, liquid phase, and contact between a probe (or probe composition) and a target. Conveniently and preferably, at least one denaturation step precedes a step wherein a probe or probe composition is contacted with a target. Guidance for performing hybridization reactions can be found in Ausubel et al., Current Protocols in Molecular Biology, John Wiley & Sons, N.Y. (2003), 6.3.1-6.3.6. Aqueous and nonaqueous methods are described in that reference and either can be used. Hybridization conditions referred to herein are a 50% formamide, 2×SSC wash for 10 minutes at 45° C. followed by a 2×SSC wash for 10 minutes at 37° C.

[0029] Calculations of “identity” between two sequences can be performed as follows. The sequences are aligned for optimal comparison purposes (e.g., gaps can be introduced in one or both of a first and a second nucleic acid sequence for optimal alignment and non-identical sequences can be disregarded for comparison purposes). The length of a sequence aligned for comparison purposes is at least 30% (e.g., at least 40%, 50%, 60%, 70%, 80%, 90% or 100%) of the length of the reference sequence. The nucleotides at corresponding nucleotide positions are then compared. When a position in the first sequence is occupied by the same nucleotide as the corresponding position in the second sequence, then the molecules are identical at that position. The percent identity between the two sequences is a function of the number of identical positions shared by the sequences, taking into account the number of gaps, and the length of each gap, which need to be introduced for optimal alignment of the two sequences.

[0030] The comparison of sequences and determination of percent identity between two sequences can be accomplished using a mathematical algorithm. In some embodiments, the percent identity between two nucleotide sequences is determined using the GAP program in the GCG software package, using a Blossum 62 scoring matrix with a gap penalty of 12, a gap extend penalty of 4, and a frameshift gap penalty of 5.

[0031] As used herein, the term “substantially identical” is used to refer to a first nucleotide sequence that contains a sufficient number of identical nucleotides to a second nucleotide sequence such that the first and second nucleotide sequences have similar activities. Nucleotide sequences that are substantially identical are at least 80% (e.g., 85%, 90%, 95%, 97% or more) identical.

[0032] The term “nonspecific binding DNA” refers to DNA which is complementary to DNA segments of a probe, which DNA occurs in at least one other position in a genome, outside of a selected chromosomal target region within that genome. An example of nonspecific binding DNA comprises a class of DNA repeated segments whose members commonly occur in more than one chromosome or chromosome region. Such common repetitive segments tend to hybridize to a greater extent than other DNA segments that are present in probe composition.

[0033] As used herein, the term “stratification” refers to the creation of a distinction between subjects on the basis of a characteristic or characteristics of the subjects. Generally, in the context of clinical trials, the distinction is used to distinguish responses or effects in different sets of patients distinguished according to the stratification parameters. In some embodiments, stratification includes distinction of subject groups based on the presence or absence of particular markers or alleles described herein. The stratification can be performed, e.g., in the course of analysis, or can be used in creation of distinct groups or in other ways.

### Methods of Predicting Response and Selecting Optimal Treatment

[0034] Described herein are a variety of methods for predicting a subject's response, or selecting and optimizing (and optionally administering) a treatment for a subject having an SSD (e.g., SZ) based on the presence or absence of a response allele.

[0035] As used herein, “determining the identity of an allele” includes obtaining information regarding the identity (i.e., of a specific nucleotide), presence or absence of one or more specific alleles in a subject. Determining the identity of an allele can, but need not, include obtaining a sample comprising DNA from a subject, and/or assessing the identity, presence or absence of one or more genetic markers in the sample. The individual or organization who determines the identity of the allele need not actually carry out the physical analysis of a sample from a subject; the methods can include using information obtained by analysis of the sample by a third party. Thus the methods can include steps that occur at more than one site. For example, a sample can be obtained from a subject at a first site, such as at a health care provider, or at the subject's home in the case of a self-testing kit. The sample can be analyzed at the same or a second site, e.g., at a laboratory or other testing facility.

[0036] Determining the identity of an allele can also include or consist of reviewing a subject's medical history, where the medical history includes information regarding the identity, presence or absence of one or more response alleles in the subject, e.g., results of a genetic test.

[0037] In some embodiments, to determine the identity of an allele described herein, a biological sample that includes nucleated cells (such as blood, a cheek swab or mouthwash) is prepared and analyzed for the presence or absence of preselected markers. Such diagnoses may be performed by diagnostic laboratories, or, alternatively, diagnostic kits can be manufactured and sold to health care providers or to private individuals for self-diagnosis. Diagnostic or prognostic tests can be performed as described herein or using well known techniques, such as described in U.S. Pat. No. 5,800,998.

[0038] Results of these tests, and optionally interpretive information, can be returned to the subject, the health care provider or to a third party payor. The results can be used in a number of ways. The information can be, e.g., communicated to the tested subject, e.g., with a prognosis and optionally interpretive materials that help the subject understand the test results and prognosis. The information can be used, e.g., by a health care provider, to determine whether to administer a specific drug, or whether a subject should be assigned to a specific category, e.g., a category associated with a specific disease endophenotype, or with drug response or non-response. The information can be used, e.g., by a third party payor such as a healthcare payer (e.g., insurance company or HMO) or other agency, to determine whether or not to reimburse a health care provider for services to the subject, or whether to approve the provision of services to the subject. For example, the healthcare payer may decide to reimburse a health care provider for treatments for an SSD if the subject has a particular response allele. As another example, a drug or treatment may be indicated for individuals with a certain allele, and the insurance company would only reimburse the health care provider (or the insured individual) for prescription or purchase of the drug if the insured individual has that response allele. The presence or absence of the response allele in a patient may be ascertained by using any of the methods described herein.

[0039] Response Alleles

[0040] This document provides methods for predicting response and selecting an optimal treatment based on evaluation of one or more single nucleotide polymorphisms (SNPs) associated with specific treatment responses in subjects having SZ or SZ-spectrum disorders including SZ, SPD, or SD. Tables 1-20 and Table A list specific SNPs, variation of which is associated with altered response. One of skill in the art will appreciate that other variants can be identified and verified by Case/Control comparisons using the SNP markers presented herein. Using SNP markers that are identical to or in linkage disequilibrium with the exemplary SNPs, one can determine additional alleles of the genes, such as haplotypes, relating to response to treatment of an SSD (e.g., SZ). The allelic variants thus identified can be used, e.g., to select optimal treatments (e.g., pharmaceutical and/or psychosocial intervention) for patients.

[0041] Markers in Linkage disequilibrium (LD)

[0042] Linkage disequilibrium (LD) is a measure of the degree of association between alleles in a population. One of skill in the art will appreciate that alleles involving markers in LD with the polymorphisms described herein can also be used in a similar manner to those described herein. Methods of calculating LD are known in the art (see, e.g., Morton et al., Proc. Natl. Acad. Sci. USA 98(9):5217-21 (2001); Tapper et al., Proc. Natl. Acad. Sci. USA 102(33):11835-11839 (2005); Maniatis et al., Proc. Natl. Acad. Sci. USA 99:2228-2233 (2002)). Thus, in some cases, the methods can include analysis of polymorphisms that are in LD with a polymorphism described herein. Methods are known in the art for identifying such polymorphisms; for example, the International HapMap Project provides a public database that can be used, see hapmap.org, as well as The International HapMap Consortium, Nature 426:789-796 (2003), and The International HapMap Consortium, Nature 437:1299-1320 (2005). Generally, it will be desirable to use a HapMap constructed using data from individuals who share ethnicity with the subject. For example, a HapMap for African Americans would ideally be used to identify markers in LD with an exemplary marker described herein for use in genotyping a subject of African American descent.

[0043] Alternatively, methods described herein can include analysis of polymorphisms that show a correlation coefficient (r²) of value ≧0.5 with the markers described herein. Results can be obtained from on line public resources such as HapMap.org on the World Wide Web. The correlation coefficient is a measure of LD, and reflects the degree to which alleles at two loci (for example, two SNPs) occur together, such that an allele at one SNP position can predict the correlated allele at a second SNP position, in the case where r² is >0.5.

[0044] Identifying Additional Genetic Markers

[0045] In general, genetic markers can be identified using any of a number of methods well known in the art. For example, numerous polymorphisms in the regions described herein are known to exist and are available in public databases, which can be searched using methods and algorithms known in the art. Alternately, polymorphisms can be identified by sequencing either genomic DNA or cDNA in the region in which it is desired to find a polymorphism. According to one approach, primers are designed to amplify such a region, and DNA from a subject is obtained and amplified. The DNA is sequenced, and the sequence (referred to as a “subject sequence” or “test sequence”) is compared with a reference sequence, which can represent the “normal” or “wild type” sequence, or the “affected” sequence. In some embodiments, a reference sequence can be from, for example, the human draft genome sequence, publicly available in various databases, or a sequence deposited in a database such as GenBank. In some embodiments, the reference sequence is a composite of ethnically diverse individuals.

[0046] In general, if sequencing reveals a difference between the sequenced region and the reference sequence, a polymorphism has been identified. The fact that a difference in nucleotide sequence is identified at a particular site that determines that a polymorphism exists at that site.

[0047] In most instances, particularly in the case of SNPs, only two polymorphic variants will exist at any location. However, in the case of SNPs, up to four variants may exist since there are four naturally occurring nucleotides in DNA. Other polymorphisms, such as insertions and deletions, may have more than four alleles.

[0048] In some embodiments, the methods include determining the presence or absence of one or more other markers that are or may be associated with treatment response, e.g., in one or more genes, e.g., as described in WO 2009/092032, WO 2009/089120, WO 2009/082743, US2006/0177851, or US2009/0012371, incorporated herein in their entirety. See also, e.g., OMIM entry no. 181500 (SCZD).

[0049] Methods of Determining Identity of a Subject's Response Allele

[0050] The methods described herein include determining the identity, e.g., the specific nucleotide, presence or absence, of alleles associated with a predicted response to a treatment for an SSD, e.g., SZ. In some embodiments, a predicted response to a method of treating an SSD is determined by detecting the presence of an identical allele in both the subject and an individual with a known response to a method of treating an SSD, e.g., in an unrelated reference subject or a first or second-degree relation of the subject, and, in some cases, the absence of the allele in an reference individual having a known but opposite response. Thus the methods can include obtaining and analyzing a sample from a suitable reference individual. Samples that are suitable for use in the methods described herein contain genetic material, e.g., genomic DNA (gDNA). Genomic DNA is typically extracted from biological samples such as blood or mucosal scrapings of the lining of the mouth, but can be extracted from other biological samples including urine or expectorant. The sample itself will typically include nucleated cells (e.g., blood or buccal cells) or tissue removed from the subject. The subject can be an adult, child, fetus, or embryo. In some embodiments, the sample is obtained prenatally, either from a fetus or embryo or from the mother (e.g., from fetal or embryonic cells in the maternal circulation). Methods and reagents are known in the art for obtaining, processing, and analyzing samples. In some embodiments, the sample is obtained with the assistance of a health care provider, e.g., to draw blood. In some embodiments, the sample is obtained without the assistance of a health care provider, e.g., where the sample is obtained non-invasively, such as a sample comprising buccal cells that is obtained using a buccal swab or brush, or a mouthwash sample.

[0051] In some cases, a biological sample may be processed for DNA isolation. For example, DNA in a cell or tissue sample can be separated from other components of the sample. Cells can be harvested from a biological sample using standard techniques known in the art. For example, cells can be harvested by centrifuging a cell sample and resuspending the pelleted cells. The cells can be resuspended in a buffered solution such as phosphate-buffered saline (PBS). After centrifuging the cell suspension to obtain a cell pellet, the cells can be lysed to extract DNA, e.g., gDNA. See, e.g., Ausubel et al., 2003, supra. The sample can be concentrated and/or purified to isolate DNA. All samples obtained from a subject, including those subjected to any sort of further processing, are considered to be obtained from the subject. Routine methods can be used to extract genomic DNA from a biological sample, including, for example, phenol extraction. Alternatively, genomic DNA can be extracted with kits such as the QIAamp® Tissue Kit (Qiagen, Chatsworth, Calif.) and the Wizard® Genomic DNA purification kit (Promega). Non-limiting examples of sources of samples include urine, blood, and tissue.

[0052] The presence or absence of an allele or genotype associated with a predicted response to treatment for an SPD (e.g., SZ) as described herein can be determined using methods known in the art. For example, gel electrophoresis, capillary electrophoresis, size exclusion chromatography, sequencing, and/or arrays can be used to detect the presence or absence of specific response alleles. Amplification of nucleic acids, where desirable, can be accomplished using methods known in the art, e.g., PCR. In one example, a sample (e.g., a sample comprising genomic DNA), is obtained from a subject. The DNA in the sample is then examined to determine the identity of an allele as described herein, i.e., by determining the identity of one or more alleles associated with a selected response. The identity of an allele can be determined by any method described herein, e.g., by sequencing or by hybridization of the gene in the genomic DNA, RNA, or cDNA to a nucleic acid probe, e.g., a DNA probe (which includes cDNA and oligonucleotide probes) or an RNA probe. The nucleic acid probe can be designed to specifically or preferentially hybridize with a particular polymorphic variant.

[0053] Other methods of nucleic acid analysis can include direct manual sequencing (Church and Gilbert, Proc. Natl. Acad. Sci. USA 81:1991-1995 (1988); Sanger et al., Proc. Natl. Acad. Sci. USA 74:5463-5467 (1977); Beavis et al., U.S. Pat. No. 5,288,644); automated fluorescent sequencing; single-stranded conformation polymorphism assays (SSCP) (Schafer et al., Nat. Biotechnol. 15:33-39 (1995)); clamped denaturing gel electrophoresis (CDGE); two-dimensional gel electrophoresis (2DGE or TDGE); conformational sensitive gel electrophoresis (CSGE); denaturing gradient gel electrophoresis (DGGE) (Sheffield et al., Proc. Natl. Acad. Sci. USA 86:232-236 (1989)); denaturing high performance liquid chromatography (DHPLC, Underhill et al., Genome Res. 7:996-1005 (1997)); infrared matrix-assisted laser desorption/ionization (IR-MALDI) mass spectrometry (WO 99/57318); mobility shift analysis (Orita et al., Proc. Natl. Acad. Sci. USA 86:2766-2770 (1989)); restriction enzyme analysis (Flavell et al., Cell 15:25 (1978); Geever et al., Proc. Natl. Acad. Sci. USA 78:5081 (1981)); quantitative real-time PCR (Raca et al., Genet Test 8(4):387-94 (2004)); heteroduplex analysis; chemical mismatch cleavage (CMC) (Cotton et al., Proc. Natl. Acad. Sci. USA 85:4397-4401 (1985)); RNase protection assays (Myers et al., Science 230:1242 (1985)); use of polypeptides that recognize nucleotide mismatches, e.g., E. coli mutS protein; allele-specific PCR, and combinations of such methods. See, e.g., Gerber et al., U.S. Patent Publication No. 2004/0014095 which is incorporated herein by reference in its entirety.

[0054] Sequence analysis can also be used to detect specific polymorphic variants. For example, polymorphic variants can be detected by sequencing exons, introns, 5′ untranslated sequences, or 3′ untranslated sequences. A sample comprising DNA or RNA is obtained from the subject. PCR or other appropriate methods can be used to amplify a portion encompassing the polymorphic site, if desired. The sequence is then ascertained, using any standard method, and the presence of a polymorphic variant is determined. Real-time pyrophosphate DNA sequencing is yet another approach to detection of polymorphisms and polymorphic variants (Alderborn et al., Genome Research 10(8):1249-1258 (2000)). Additional methods include, for example, PCR amplification in combination with denaturing high performance liquid chromatography (dHPLC) (Underhill et al., Genome Research 7(10):996-1005 (1997)).

[0055] In order to detect polymorphisms and/or polymorphic variants, it may be desirable to amplify a portion of genomic DNA (gDNA) encompassing the polymorphic site. Such regions can be amplified and isolated by PCR using oligonucleotide primers designed based on genomic and/or cDNA sequences that flank the site. PCR refers to procedures in which target nucleic acid (e.g., genomic DNA) is amplified in a manner similar to that described in U.S. Pat. No. 4,683,195, and subsequent modifications of the procedure described therein. Generally, sequence information from the ends of the region of interest or beyond are used to design oligonucleotide primers that are identical or similar in sequence to opposite strands of a potential template to be amplified. See e.g., PCR Primer: A Laboratory Manual, Dieffenbach and Dveksler, (Eds.); McPherson et al., PCR Basics: From Background to Bench (Springer Verlag, 2000); Mattila et al., Nucleic Acids Res., 19:4967 (1991); Eckert et al., PCR Methods and Applications, 1:17 (1991); PCR (eds. McPherson et al., IRL Press, Oxford); and U.S. Pat. No. 4,683,202. Other amplification methods that may be employed include the ligase chain reaction (LCR) (Wu and Wallace, Genomics 4:560 (1989), Landegren et al., Science 241:1077 (1988), transcription amplification (Kwoh et al., Proc. Natl. Acad. Sci. USA 86:1173 (1989)), self-sustained sequence replication (Guatelli et al., Proc. Nat. Acad. Sci. USA 87:1874 (1990)), and nucleic acid based sequence amplification (NASBA). Guidelines for selecting primers for PCR amplification are well known in the art. See, e.g., McPherson et al., PCR Basics: From Background to Bench, Springer-Verlag, 2000. A variety of computer programs for designing primers are available, e.g., ‘Oligo’ (National Biosciences, Inc, Plymouth Minn.), MacVector (Kodak/IBI), and the GCG suite of sequence analysis programs (Genetics Computer Group, Madison, Wis. 53711).

[0056] In some cases, PCR conditions and primers can be developed that amplify a product only when the variant allele is present or only when the wild type allele is present (MSPCR or allele-specific PCR). For example, patient DNA and a control can be amplified separately using either a wild type primer or a primer specific for the variant allele. Each set of reactions is then examined for the presence of amplification products using standard methods to visualize the DNA. For example, the reactions can be electrophoresed through an agarose gel and the DNA visualized by staining with ethidium bromide or other DNA intercalating dye. In DNA samples from heterozygous patients, reaction products would be detected in each reaction.

[0057] Real-time quantitative PCR can also be used to determine copy number. Quantitative PCR permits both detection and quantification of specific DNA sequence in a sample as an absolute number of copies or as a relative amount when normalized to DNA input or other normalizing genes. A key feature of quantitative PCR is that the amplified DNA product is quantified in real-time as it accumulates in the reaction after each amplification cycle. Methods of quantification can include the use of fluorescent dyes that intercalate with double-stranded DNA, and modified DNA oligonucleotide probes that fluoresce when hybridized with a complementary DNA. Methods of quantification can include determining the intensity of fluorescence for fluorescently tagged molecular probes attached to a solid surface such as a microarray.

[0058] The first report of extensive copy number variation (CNV) in the human genome used intensity analysis of microarray data to document numerous examples of genes that vary in copy number (Redon et al., Nature 444(7118):444-54 (2006)). Subsequent studies have shown that certain copy number variants are associated with complex genetic diseases such as SZ (Walsh et al., Science 320(5875):539-43 (2008); and Stone et al., Nature 455(7210):237-41 (2008)).

[0059] In some embodiments, a peptide nucleic acid (PNA) probe can be used instead of a nucleic acid probe in the hybridization methods described above. PNA is a DNA mimetic with a peptide-like, inorganic backbone, e.g., N-(2-aminoethyl)glycine units, with an organic base (A, G, C, T or U) attached to the glycine nitrogen via a methylene carbonyl linker (see, e.g., Nielsen et al., Bioconjugate Chemistry, The American Chemical Society, 5:1 (1994)). The PNA probe can be designed to specifically hybridize to a nucleic acid comprising a polymorphic variant.

[0060] In some cases, allele-specific oligonucleotides can also be used to detect the presence of a polymorphic variant. For example, polymorphic variants can be detected by performing allele-specific hybridization or allele-specific restriction digests. Allele specific hybridization is an example of a method that can be used to detect sequence variants, including complete genotypes of a subject (e.g., a mammal such as a human). See Stoneking et al., Am. J. Hum. Genet. 48:370-382 (1991); and Prince et al., Genome Res. 11:152-162 (2001). An “allele-specific oligonucleotide” (also referred to herein as an “allele-specific oligonucleotide probe”) is an oligonucleotide that is specific for particular a polymorphism can be prepared using standard methods (see Ausubel et al., Current Protocols in Molecular Biology, supra). Allele-specific oligonucleotide probes typically can be approximately 10-50 base pairs, preferably approximately 15-30 base pairs, that specifically hybridizes to a nucleic acid region that contains a polymorphism. Hybridization conditions are selected such that a nucleic acid probe can specifically bind to the sequence of interest, e.g., the variant nucleic acid sequence. Such hybridizations typically are performed under high stringency as some sequence variants include only a single nucleotide difference. In some cases, dot-blot hybridization of amplified oligonucleotides with allele-specific oligonucleotide (ASO) probes can be performed. See, for example, Saiki et al., Nature (London) 324:163-166 (1986).

[0061] In some embodiments, allele-specific restriction digest analysis can be used to detect the existence of a polymorphic variant of a polymorphism, if alternate polymorphic variants of the polymorphism result in the creation or elimination of a restriction site. Allele-specific restriction digests can be performed in the following manner. A sample containing genomic DNA is obtained from the individual and genomic DNA is isolated for analysis. For nucleotide sequence variants that introduce a restriction site, restriction digest with the particular restriction enzyme can differentiate the alleles. In some cases, polymerase chain reaction (PCR) can be used to amplify a region comprising the polymorphic site, and restriction fragment length polymorphism analysis is conducted (see Ausubel et al., Current Protocols in Molecular Biology, supra). The digestion pattern of the relevant DNA fragment indicates the presence or absence of a particular polymorphic variant of the polymorphism and is therefore indicative of the subject's response allele. For sequence variants that do not alter a common restriction site, mutagenic primers can be designed that introduce a restriction site when the variant allele is present or when the wild type allele is present. For example, a portion of a nucleic acid can be amplified using the mutagenic primer and a wild type primer, followed by digest with the appropriate restriction endonuclease.

[0062] In some embodiments, fluorescence polarization template-directed dye-terminator incorporation (FP-TDI) is used to determine which of multiple polymorphic variants of a polymorphism is present in a subject (Chen et al., Genome Research 9(5):492-498 (1999)). Rather than involving use of allele-specific probes or primers, this method employs primers that terminate adjacent to a polymorphic site, so that extension of the primer by a single nucleotide results in incorporation of a nucleotide complementary to the polymorphic variant at the polymorphic site.

[0063] In some cases, DNA containing an amplified portion may be dot-blotted, using standard methods (see Ausubel et al., Current Protocols in Molecular Biology, supra), and the blot contacted with the oligonucleotide probe. The presence of specific hybridization of the probe to the DNA is then detected. Specific hybridization of an allele-specific oligonucleotide probe (specific for a polymorphic variant indicative of a predicted response to a method of treating an SSD) to DNA from the subject is indicative of a subject's response allele.

[0064] The methods can include determining the genotype of a subject with respect to both copies of the polymorphic site present in the genome (i.e., both alleles). For example, the complete genotype may be characterized as −/−, as −/+, or as +/+, where a minus sign indicates the presence of the reference or wild type sequence at the polymorphic site, and the plus sign indicates the presence of a polymorphic variant other than the reference sequence. If multiple polymorphic variants exist at a site, this can be appropriately indicated by specifying which ones are present in the subject. Any of the detection means described herein can be used to determine the genotype of a subject with respect to one or both copies of the polymorphism present in the subject's genome.

[0065] Methods of nucleic acid analysis to detect polymorphisms and/or polymorphic variants can include, e.g., microarray analysis. Hybridization methods, such as Southern analysis, Northern analysis, or in situ hybridizations, can also be used (see Ausubel et al., Current Protocols in Molecular Biology, eds., John Wiley & Sons (2003)). To detect microdeletions, fluorescence in situ hybridization (FISH) using DNA probes that are directed to a putatively deleted region in a chromosome can be used. For example, probes that detect all or a part of a microsatellite marker can be used to detect microdeletions in the region that contains that marker.

[0066] In some embodiments, it is desirable to employ methods that can detect the presence of multiple polymorphisms (e.g., polymorphic variants at a plurality of polymorphic sites) in parallel or substantially simultaneously. Oligonucleotide arrays represent one suitable means for doing so. Other methods, including methods in which reactions (e.g., amplification, hybridization) are performed in individual vessels, e.g., within individual wells of a multi-well plate or other vessel may also be performed so as to detect the presence of multiple polymorphic variants (e.g., polymorphic variants at a plurality of polymorphic sites) in parallel or substantially simultaneously according to the methods provided herein.

[0067] Nucleic acid probes can be used to detect and/or quantify the presence of a particular target nucleic acid sequence within a sample of nucleic acid sequences, e.g., as hybridization probes, or to amplify a particular target sequence within a sample, e.g., as a primer. Probes have a complimentary nucleic acid sequence that selectively hybridizes to the target nucleic acid sequence. In order for a probe to hybridize to a target sequence, the hybridization probe must have sufficient identity with the target sequence, i.e., at least 70% (e.g., 80%, 90%, 95%, 98% or more) identity to the target sequence. The probe sequence must also be sufficiently long so that the probe exhibits selectivity for the target sequence over non-target sequences. For example, the probe will be at least 20 (e.g., 25, 30, 35, 50, 100, 200, 300, 400, 500, 600, 700, 800, 900 or more) nucleotides in length. In some embodiments, the probes are not more than 30, 50, 100, 200, 300, 500, 750, or 1000 nucleotides in length. Probes are typically about 20 to about 1×10⁶ nucleotides in length. Probes include primers, which generally refers to a single-stranded oligonucleotide probe that can act as a point of initiation of template-directed DNA synthesis using methods such as PCR (polymerase chain reaction), LCR (ligase chain reaction), etc., for amplification of a target sequence.

[0068] The probe can be a test probe such as a probe that can be used to detect polymorphisms in a region described herein (e.g., an allele associated with treatment response as described herein). In some embodiments, the probe can bind to another marker sequence associated with SZ, SPD, or SD as described herein or known in the art.

[0069] Control probes can also be used. For example, a probe that binds a less variable sequence, e.g., repetitive DNA associated with a centromere of a chromosome, can be used as a control. Probes that hybridize with various centromeric DNA and locus-specific DNA are available commercially, for example, from Vysis, Inc. (Downers Grove, Ill.), Molecular Probes, Inc. (Eugene, Oreg.), or from Cytocell (Oxfordshire, UK). Probe sets are available commercially such from Applied Biosystems, e.g., the Assays-on-Demand SNP kits Alternatively, probes can be synthesized, e.g., chemically or in vitro, or made from chromosomal or genomic DNA through standard techniques. For example, sources of DNA that can be used include genomic DNA, cloned DNA sequences, somatic cell hybrids that contain one, or a part of one, human chromosome along with the normal chromosome complement of the host, and chromosomes purified by flow cytometry or microdissection. The region of interest can be isolated through cloning, or by site-specific amplification via the polymerase chain reaction (PCR). See, for example, Nath and Johnson, Biotechnic. Histochem. 73(1):6-22 (1998); Wheeless et al., Cytometry 17:319-326 (1994); and U.S. Pat. No. 5,491,224.

[0070] In some embodiments, the probes are labeled, e.g., by direct labeling, with a fluorophore, an organic molecule that fluoresces after absorbing light of lower wavelength/higher energy. A directly labeled fluorophore allows the probe to be visualized without a secondary detection molecule. After covalently attaching a fluorophore to a nucleotide, the nucleotide can be directly incorporated into the probe with standard techniques such as nick translation, random priming, and PCR labeling. Alternatively, deoxycytidine nucleotides within the probe can be transaminated with a linker. The fluorophore then is covalently attached to the transaminated deoxycytidine nucleotides. See, e.g., U.S. Pat. No. 5,491,224.

[0071] Fluorophores of different colors can be chosen such that each probe in a set can be distinctly visualized. For example, a combination of the following fluorophores can be used: 7-amino-4-methylcoumarin-3-acetic acid (AMCA), TEXAS RED™ (Molecular Probes, Inc., Eugene, Oreg.), 5-(and -6)-carboxy-X-rhodamine, lissamine rhodamine B, 5-(and -6)-carboxyfluorescein, fluorescein-5-isothiocyanate (FITC), 7-diethylaminocoumarin-3-carboxylic acid, tetramethylrhodamine-5-(and -6)-isothiocyanate, 5-(and -6)-carboxytetramethylrhodamine, 7-hydroxycoumarin-3-carboxylic acid, 6-[fluorescein 5-(and -6)-carboxamido]hexanoic acid, N-(4,4-difluoro-5,7-dimethyl-4-bora-3a,4a diaza-3-indacenepropionic acid, eosin-5-isothiocyanate, erythrosin-5-isothiocyanate, and CASCADE™ blue acetylazide (Molecular Probes, Inc., Eugene, Oreg.). Fluorescently labeled probes can be viewed with a fluorescence microscope and an appropriate filter for each fluorophore, or by using dual or triple band-pass filter sets to observe multiple fluorophores. See, for example, U.S. Pat. No. 5,776,688. Alternatively, techniques such as flow cytometry can be used to examine the hybridization pattern of the probes. Fluorescence-based arrays are also known in the art.

[0072] In other embodiments, the probes can be indirectly labeled with, e.g., biotin or digoxygenin, or labeled with radioactive isotopes such as ³²P and ³H. For example, a probe indirectly labeled with biotin can be detected by avidin conjugated to a detectable marker. For example, avidin can be conjugated to an enzymatic marker such as alkaline phosphatase or horseradish peroxidase. Enzymatic markers can be detected in standard colorimetric reactions using a substrate and/or a catalyst for the enzyme. Catalysts for alkaline phosphatase include 5-bromo-4-chloro-3-indolylphosphate and nitro blue tetrazolium. Diaminobenzoate can be used as a catalyst for horseradish peroxidase.

[0073] In another aspect, this document features arrays that include a substrate having a plurality of addressable areas, and methods of using them. At least one area of the plurality includes a nucleic acid probe that binds specifically to a sequence comprising a polymorphism listed in Table A, and can be used to detect the absence or presence of said polymorphism, e.g., one or more SNPs, microsatellites, minisatellites, or indels, as described herein, to determine a response allele. For example, the array can include one or more nucleic acid probes that can be used to detect a polymorphism listed in Table A. In some embodiments, the array further includes at least one area that includes a nucleic acid probe that can be used to specifically detect another marker associated with a predicted response to a method of treating an SSD (e.g., SZ), as described herein. In some embodiments, the probes are nucleic acid capture probes.

[0074] Generally, microarray hybridization is performed by hybridizing a nucleic acid of interest (e.g., a nucleic acid encompassing a polymorphic site) with the array and detecting hybridization using nucleic acid probes. In some cases, the nucleic acid of interest is amplified prior to hybridization. Hybridization and detecting are generally carried out according to standard methods. See, e.g., Published PCT Application Nos. WO 92/10092 and WO 95/11995, and U.S. Pat. No. 5,424,186. For example, the array can be scanned to determine the position on the array to which the nucleic acid hybridizes. The hybridization data obtained from the scan is typically in the form of fluorescence intensities as a function of location on the array.

[0075] Arrays can be formed on substrates fabricated with materials such as paper, glass, plastic (e.g., polypropylene, nylon, or polystyrene), polyacrylamide, nitrocellulose, silicon, optical fiber, or any other suitable solid or semisolid support, and can be configured in a planar (e.g., glass plates, silicon chips) or three dimensional (e.g., pins, fibers, beads, particles, microtiter wells, capillaries) configuration. Methods for generating arrays are known in the art and include, e.g., photolithographic methods (see, e.g., U.S. Pat. Nos. 5,143,854; 5,510,270; and 5,527,681), mechanical methods (e.g., directed-flow methods as described in U.S. Pat. No. 5,384,261), pin-based methods (e.g., as described in U.S. Pat. No. 5,288,514), and bead-based techniques (e.g., as described in PCT US/93/04145). The array typically includes oligonucleotide hybridization probes capable of specifically hybridizing to different polymorphic variants. Oligonucleotide probes that exhibit differential or selective binding to polymorphic sites may readily be designed by one of ordinary skill in the art. For example, an oligonucleotide that is perfectly complementary to a sequence that encompasses a polymorphic site (i.e., a sequence that includes the polymorphic site, within it or at one end) will generally hybridize preferentially to a nucleic acid comprising that sequence, as opposed to a nucleic acid comprising an alternate polymorphic variant.

[0076] Oligonucleotide probes forming an array may be attached to a substrate by any number of techniques, including, without limitation, (i) in situ synthesis (e.g., high-density oligonucleotide arrays) using photolithographic techniques; (ii) spotting/printing at medium to low density on glass, nylon or nitrocellulose; (iii) by masking, and (iv) by dot-blotting on a nylon or nitrocellulose hybridization membrane. Oligonucleotides can be immobilized via a linker, including by covalent, ionic, or physical linkage. Linkers for immobilizing nucleic acids and polypeptides, including reversible or cleavable linkers, are known in the art. See, for example, U.S. Pat. No. 5,451,683 and WO98/20019. Alternatively, oligonucleotides can be non-covalently immobilized on a substrate by hybridization to anchors, by means of magnetic beads, or in a fluid phase such as in microtiter wells or capillaries. Immobilized oligonucleotide probes are typically about 20 nucleotides in length, but can vary from about 10 nucleotides to about 1000 nucleotides in length.

[0077] Arrays can include multiple detection blocks (i.e., multiple groups of probes designed for detection of particular polymorphisms). Such arrays can be used to analyze multiple different polymorphisms. Detection blocks may be grouped within a single array or in multiple, separate arrays so that varying conditions (e.g., conditions optimized for particular polymorphisms) may be used during the hybridization. For example, it may be desirable to provide for the detection of those polymorphisms that fall within G-C rich stretches of a genomic sequence, separately from those falling in A-T rich segments. General descriptions of using oligonucleotide arrays for detection of polymorphisms can be found, for example, in U.S. Pat. Nos. 5,858,659 and 5,837,832. In addition to oligonucleotide arrays, cDNA arrays may be used similarly in certain embodiments.

[0078] The methods described herein can include providing an array as described herein; contacting the array with a sample (e.g., all or a portion of genomic DNA that includes at least a portion of a human chromosome comprising a response allele) and/or optionally, a different portion of genomic DNA (e.g., a portion that includes a different portion of one or more human chromosomes), and detecting binding of a nucleic acid from the sample to the array. Optionally, the method includes amplifying nucleic acid from the sample, e.g., genomic DNA that includes a portion of a human chromosome described herein, and, optionally, a region that includes another region associated with a predicted response to a method of treating SZ, SD, or SPD, prior to or during contact with the array.

[0079] In some aspects, the methods described herein can include using an array that can ascertain differential expression patterns or copy numbers of one or more genes in samples from normal and affected individuals (see, e.g., Redon et al., Nature 444(7118):444-54 (2006)). For example, arrays of probes to a marker described herein can be used to measure polymorphisms between DNA from a subject having an SSD (e.g., SZ) and having a predicted response to a treatment for an SSD (e.g., SZ), and control DNA, e.g., DNA obtained from an individual that has SZ, SPD, or SD, and has a known response to a form of treatment for an SSD (e.g., SZ). Since the clones on the array contain sequence tags, their positions on the array are accurately known relative to the genomic sequence. Different hybridization patterns between DNA from an individual afflicted with an SSD (e.g., SZ) and DNA from a control individual at areas in the array corresponding to markers as described herein, and, optionally, one or more other regions associated with an SSD (e.g., SZ), are indicative of a predicted response to a treatment for an SSD (e.g., SZ). Methods for array production, hybridization, and analysis are described, e.g., in Snijders et al., Nat. Genetics 29:263-264 (2001); Klein et al., Proc. Natl. Acad. Sci. USA 96:4494-4499 (1999); Albertson et al., Breast Cancer Research and Treatment 78:289-298 (2003); and Snijders et al., “BAC microarray based comparative genomic hybridization,” in: Zhao et al. (eds), Bacterial Artificial Chromosomes: Methods and Protocols, Methods in Molecular Biology, Humana Press, 2002.

[0080] In another aspect, this document provides methods of determining the absence or presence of a response allele associated with a predicted response to treatment for an SSD (e.g., SZ) as described herein, using an array described above. The methods can include providing a two dimensional array having a plurality of addresses, each address of the plurality being positionally distinguishable from each other address of the plurality having a unique nucleic acid capture probe, contacting the array with a first sample from a test subject who is has an SSD (e.g., SZ), and comparing the binding of the first sample with one or more references, e.g., binding of a sample from a subject who is known to have an SSD (e.g., SZ), and/or binding of a sample from a subject who has an SSD (e.g., SZ) and a known response to treatment for an SSD (e.g., SZ); and comparing the binding of the first sample with the binding of the second sample. In some embodiments, the methods can include contacting the array with a third sample from a cell or subject that does not have SZ; and comparing the binding of the first sample with the binding of the third sample. In some embodiments, the second and third samples are from first or second-degree relatives of the test subject. In the case of a nucleic acid hybridization, binding with a capture probe at an address of the plurality, can be detected by any method known in the art, e.g., by detection of a signal generated from a label attached to the nucleic acid.

### Schizophrenia Spectrum Disorders

[0081] The methods described herein can be used to determine an individual predicted response to a method of treating a schizophrenia spectrum disorder (SSD). The SSDs include schizophrenia (SZ), schizotypal personality disorder (SPD), and schizoaffective disorder (SD). Methods for diagnosing SSDs are known in the art, see, e.g., the DSM-IV. See, e.g., WO 2009/092032, incorporated herein by reference.

### Methods of Selecting and Optimizing Treatment

[0082] In some embodiments, the methods described herein include the administration of one or more treatments, e.g., antipsychotic medications, to a person identified as having or being at risk of developing an SSD (e.g., SZ). The methods can also include selecting a treatment regimen for a subject who has an SSD or is determined to be at risk for developing an SSD (e.g., SZ), based upon the absence or presence of an allele or genotype associated with response as described herein. The determination of a treatment regimen can also be based upon the absence or presence of other risk factors, e.g., as known in the art or described herein. The methods can also include administering a treatment regimen selected by a method described to a subject who has or is at risk for developing an SSD (e.g., SZ) to thereby treat, reduce risk of developing, or delay further progression of the disease. A treatment regimen can include the administration of antipsychotic medications to a subject identified as having or at risk of developing an SSD (e.g., SZ) before the onset of any psychotic episodes.

[0083] As used herein, the term “treat” or “treatment” is defined as the application or administration of a treatment regimen, e.g., a therapeutic agent or modality, to a subject, e.g., a patient. The subject can be a patient having an SSD (e.g., SZ), a symptom of an SSD (e.g., SZ), or at risk of developing (i.e., a predisposition toward) an SSD (e.g., SZ). The treatment can be to cure, heal, alleviate, relieve, alter, remedy, ameliorate, palliate, improve or affect an SSD (e.g., SZ), the symptoms of an SSD (e.g., SZ) or the predisposition toward an SSD (e.g., SZ). For example, a standard treatment regimen for schizophrenia is the administration of antipsychotic medications, which are typically antagonists acting at postsynaptic D2 dopamine receptors in the brain and can include neuroleptics and/or atypical antipsychotics. Antipsychotic medications substantially reduce the risk of relapse in the stable phase of illness. Currently accepted treatments for SZ are described in greater detail in the Practice Guideline for the Treatment of Patients With Schizophrenia American Psychiatric Association, Second Edition, American Psychiatric Association, 2004, which is incorporated herein by reference in its entirety.

[0084] The methods of determining a treatment regimen and methods of treatment or prevention of SSDs as described herein can further include the step of monitoring the subject, e.g., for a change (e.g., an increase or decrease) in one or more of the diagnostic criteria for an SSD listed herein, or any other parameter related to clinical outcome. The subject can be monitored in one or more of the following periods: prior to beginning of treatment; during the treatment; or after one or more elements of the treatment have been administered. Monitoring can be used to evaluate the need for further treatment with the same or a different therapeutic agent or modality. Generally, a decrease in one or more of the parameters described above is indicative of the improved condition of the subject, although with red blood cell and platelet levels, an increase can be associated with the improved condition of the subject.

[0085] The methods can be used, for example, to choose between alternative treatments (e.g., a particular dosage, mode of delivery, time of delivery, inclusion of adjunctive therapy, e.g., administration in combination with a second agent) based on the subject's probable drug response. In some embodiments, a treatment for a subject having an SSD (e.g., SZ) is selected based on the subject's response allele, and the treatment is administered to the subject. In some embodiments, various treatments or combinations of treatments can be administered based on the presence in a subject of a response allele as described herein. Various treatment regimens are known for treating SSDs including, for example, regimens as described herein.

[0086] With regards to both prophylactic and therapeutic methods of treatment of SSDs, according to the present methods treatment can be specifically tailored or modified, based on knowledge obtained from pharmacogenomics. “Pharmacogenomics,” as used herein, refers to the application of genomics technologies such as structural chromosomal analysis, to drugs in clinical development and on the market. See, for example, Eichelbaum et al., Clin. Exp. Pharmacol. Physiol. 23:983-985 (1996); Linder et al., Clin. Chem. 43:254-266 (1997); Wang et al. (2003) Pharmacogenetics 13:555-64; Weinshilboum and Wang (2004) Nature Rev. Drug Discovery 3:739-748; Guttmacher and Collins (2005) JAMA 294:1399-402; and Weinshilboum and Wang, Annu. Rev. Genomics Hum. Genet. 7:223-45 (2006). Specifically, as used herein, the term refers the study of how a patient's genes determine his or her response to a drug (e.g., a patient's “drug response phenotype,” or “drug response allele”). Drug response phenotypes that are influenced by inheritance and can vary from potentially life-threatening adverse reactions at one of the spectrum to lack of therapeutic efficacy at the other. The ability to determine whether and how a subject will respond to a particular drug can assist medical professionals in determining whether the drug should be administered to the subject, and at what dose. Thus, this documents provides methods for tailoring an individual's prophylactic or therapeutic treatment according to the presence of specific drug response alleles in that individual.

[0087] Standard pharmacologic therapies for SSDs include the administration of one or more antipsychotic medications, which are typically antagonists acting at postsynaptic D2 dopamine receptors in the brain. Antipsychotic medications include conventional, or first generation, antipsychotic agents, which are sometimes referred to as neuroleptics because of their neurologic side effects, and second generation antipsychotic agents, which are less likely to exhibit neuroleptic effects and have been termed atypical antipsychotics. Typical antipsychotics can include chlorpromazine, fluphenazine, haloperidol, thiothixene, trifluoperazine, perphenazine, and thioridazine; atypical antipsychotics can include aripiprazole, risperidone, clozapine, olanzapine, quetiapine, or ziprasidone.

[0088] Information generated from pharmacogenomic research using a method described herein can be used to determine appropriate dosage and treatment regimens for prophylactic or therapeutic treatment of an individual. This knowledge, when applied to dosing or drug selection, can avoid adverse reactions or therapeutic failure and thus enhance therapeutic or prophylactic efficiency when administering a therapeutic composition (e.g., a cytotoxic agent or combination of cytotoxic agents) to a patient as a means of treating or preventing progression of SSDs.

[0089] In some cases, a physician or clinician may consider applying knowledge obtained in relevant pharmacogenomics studies (e.g., using a method described herein) when determining whether to administer a pharmaceutical composition such as an antipsychotic agent or a combination of antipsychotic agents to a subject. In other cases, a physician or clinician may consider applying such knowledge when determining the dosage or frequency of treatments (e.g., administration of antipsychotic agent or combination of antipsychotic agents to a patient). As one example, a physician or clinician can determine (or have determined by, for example, a laboratory) the presence of one or more response alleles in a subject as described herein, and optionally one or more other markers associated with an SSD (e.g., SZ) or response to a treatment, of one or a group of subjects, e.g., clinical patients, or subjects who may be participating in a clinical trial, e.g., a trial designed to test the efficacy of a pharmaceutical composition (e.g., an antipsychotic or combination of antipsychotic agents); the physician or clinician can then correlate the genetic makeup of the subjects with their response to the pharmaceutical composition.

[0090] As another example, information regarding a response allele as described herein can be used to stratify or select a subject population for a clinical trial. The information can, in some embodiments, be used to stratify individuals that exhibit or are likely to exhibit a toxic response to a treatment from those that will not. In other cases, the information can be used to separate those that will be non-responders from those who will be responders. The allele s described herein can be used in pharmacogenomics-based design and manage the conduct of a clinical trial, e.g., as described in U.S. Pat. Pub. No. 2003/0108938.

[0091] As another example, information regarding a response allele as described herein, can be used to stratify or select human cells or cell lines for drug testing purposes. Human cells are useful for studying the effect of a polymorphism on physiological function, and for identifying and/or evaluating potential therapeutic agents for the treatment of SSDs, e.g., anti-psychotics. Thus the methods can include performing the present methods on genetic material from a cell line. The information can, in some embodiments, be used to separate cells that respond or are expected to respond to particular drugs from those that do not respond, e.g. which cells show altered second messenger signaling.

[0092] Also included herein are compositions and methods for the identification and treatment of subjects who have a predicted response to a treatment for an SSD (e.g., SZ), such that a theranostic approach can be taken to test such individuals to predict the effectiveness of a particular therapeutic intervention (e.g., a pharmaceutical or non-pharmaceutical intervention as described herein) and to alter the intervention to (1) reduce the risk of developing adverse outcomes and (2) enhance the effectiveness of the intervention. Thus, the methods and compositions described herein also provide a means of optimizing the treatment of a subject having such a disorder. Provided herein is a theranostic approach to treating and preventing SSDs, by integrating diagnostics and therapeutics to improve the real-time treatment of a subject. Practically, this means creating tests that can identify which patients are most suited to a particular therapy, and providing feedback on how well a drug is working to optimize treatment regimens.

[0093] Within the clinical trial setting, a theranostic method as described herein can provide key information to optimize trial design, monitor efficacy, and enhance drug safety. For instance, “trial design” theranostics can be used for patient stratification, determination of patient eligibility (inclusion/exclusion), creation of homogeneous treatment groups, and selection of patient samples that are representative of the general population. Such theranostic tests can therefore provide the means for patient efficacy enrichment, thereby minimizing the number of individuals needed for trial recruitment. “Efficacy” theranostics are useful for monitoring therapy and assessing efficacy criteria. Finally, “safety” theranostics can be used to prevent adverse drug reactions or avoid medication error.

[0094] The methods described herein can include retrospective analysis of clinical trial data as well, both at the subject level and for the entire trial, to detect correlations between an allele as described herein and any measurable or quantifiable parameter relating to the outcome of the treatment, e.g., efficacy (the results of which may be binary (i.e., yes and no) as well as along a continuum), side-effect profile (e.g., weight gain, metabolic dysfunction, lipid dysfunction, movement disorders, or extrapyramidal symptoms), treatment maintenance and discontinuation rates, return to work status, hospitalizations, suicidality, total healthcare cost, social functioning scales, response to non-pharmacological treatments, and/or dose response curves. The results of these correlations can then be used to influence decision-making, e.g., regarding treatment or therapeutic strategies, provision of services, and/or payment. For example, a correlation between a positive outcome parameter (e.g., high efficacy, low side effect profile, high treatment maintenance/low discontinuation rates, good return to work status, low hospitalizations, low suicidality, low total healthcare cost, high social function scale, favorable response to non-pharmacological treatments, and/or acceptable dose response curves) and a selected allele or genotype can influence treatment such that the treatment is recommended or selected for a subject having the selected allele or genotype.

[0095] This document also provides methods and materials to assist medical or research professionals in determining whether a particular treatment regimen is optimal. Medical professionals can be, for example, doctors, nurses, medical laboratory technologists, and pharmacists. Research professionals can be, for example, principle investigators, research technicians, postdoctoral trainees, and graduate students. A professional can be assisted by (1) determining whether specific polymorphic variants are present in a biological sample from a subject, and (2) communicating information about polymorphic variants to that professional.

[0096] Using information about specific polymorphic variants determined using a method described herein, a medical professional can take one or more actions that can affect patient care. For example, a medical professional can record information in the patient's medical record regarding the patient's likely response to a given treatment for an SSD (e.g., SZ). In some cases, a medical professional can record information regarding a treatment assessment, or otherwise transform the patient's medical record, to reflect the patient's current treatment and response allele(s). In some cases, a medical professional can review and evaluate a patient's entire medical record and assess multiple treatment strategies for clinical intervention of a patient's condition.

[0097] A medical professional can initiate or modify treatment after receiving information regarding a patient's response allele(s), for example. In some cases, a medical professional can recommend a change in therapy based on the subject's response allele(s). In some cases, a medical professional can enroll a patient in a clinical trial for, by way of example, detecting correlations between an allele or genotype as described herein and any measurable or quantifiable parameter relating to the outcome of the treatment as described above.

[0098] A medical professional can communicate information regarding a patient's expected response to a treatment to a patient or a patient's family. In some cases, a medical professional can provide a patient and/or a patient's family with information regarding SSDs and response assessment information, including treatment options, prognosis, and referrals to specialists. In some cases, a medical professional can provide a copy of a patient's medical records to a specialist.

[0099] A research professional can apply information regarding a subject's response allele(s) to advance scientific research. For example, a researcher can compile data on specific polymorphic variants. In some cases, a research professional can obtain a subject's response allele(s) as described herein to evaluate a subject's enrollment, or continued participation, in a research study or clinical trial. In some cases, a research professional can communicate information regarding a subject's response allele(s) to a medical professional. In some cases, a research professional can refer a subject to a medical professional.

[0100] Any appropriate method can be used to communicate information to another person (e.g., a professional). For example, information can be given directly or indirectly to a professional. For example, a laboratory technician can input a patient's polymorphic variant alleles as described herein into a computer-based record. In some cases, information is communicated by making a physical alteration to medical or research records. For example, a medical professional can make a permanent notation or flag a medical record for communicating the response allele determination to other medical professionals reviewing the record. In addition, any type of communication can be used to communicate allelic, genotypic, and/or treatment information. For example, mail, e-mail, telephone, and face-to-face interactions can be used. The information also can be communicated to a professional by making that information electronically available to the professional. For example, the information can be communicated to a professional by placing the information on a computer database such that the professional can access the information. In addition, the information can be communicated to a hospital, clinic, or research facility serving as an agent for the professional.

### Articles of Manufacture

[0101] Also provided herein are articles of manufacture comprising a probe that hybridizes with a region of human chromosome as described herein and can be used to detect a polymorphism described herein. For example, any of the probes for detecting polymorphisms described herein can be combined with packaging material to generate articles of manufacture or kits. The kit can include one or more other elements including: instructions for use; and other reagents such as a label or an agent useful for attaching a label to the probe. Instructions for use can include instructions for diagnostic applications of the probe for predicting response to a treatment for SSDs in a method described herein. Other instructions can include instructions for attaching a label to the probe, instructions for performing in situ analysis with the probe, and/or instructions for obtaining a sample to be analyzed from a subject. In some cases, the kit can include a labeled probe that hybridizes to a region of human chromosome as described herein.

[0102] The kit can also include one or more additional reference or control probes that hybridize to the same chromosome or another chromosome or portion thereof that can have an abnormality associated with a particular response. A kit that includes additional probes can further include labels, e.g., one or more of the same or different labels for the probes. In other embodiments, the additional probe or probes provided with the kit can be a labeled probe or probes. When the kit further includes one or more additional probe or probes, the kit can further provide instructions for the use of the additional probe or probes. Kits for use in self-testing can also be provided. Such test kits can include devices and instructions that a subject can use to obtain a biological sample (e.g., buccal cells, blood) without the aid of a health care provider. For example, buccal cells can be obtained using a buccal swab or brush, or using mouthwash.

[0103] Kits as provided herein can also include a mailer (e.g., a postage paid envelope or mailing pack) that can be used to return the sample for analysis, e.g., to a laboratory. The kit can include one or more containers for the sample, or the sample can be in a standard blood collection vial. The kit can also include one or more of an informed consent form, a test requisition form, and instructions on how to use the kit in a method described herein. Methods for using such kits are also included herein. One or more of the forms (e.g., the test requisition form) and the container holding the sample can be coded, for example, with a bar code for identifying the subject who provided the sample.

### Databases and Reports

[0104] Also provided herein are databases that include a list of polymorphisms as described herein, and wherein the list is largely or entirely limited to polymorphisms identified as useful for predicting a subject's response to a treatment for an SSD (e.g., SZ) as described herein. The list is stored, e.g., on a flat file or computer-readable medium. The databases can further include information regarding one or more subjects, e.g., whether a subject is affected or unaffected, clinical information such as endophenotype, age of onset of symptoms, any treatments administered and outcomes (e.g., data relevant to pharmacogenomics, diagnostics or theranostics), and other details, e.g., about the disorder in the subject, or environmental or other genetic factors. The databases can be used to detect correlations between a particular allele or genotype and the information regarding the subject.

[0105] The methods described herein can also include the generation of reports, e.g., for use by a patient, care giver, payor, or researcher, that include information regarding a subject's response allele(s), and optionally further information such as treatments administered, treatment history, medical history, predicted response, and actual response. The reports can be recorded in a tangible medium, e.g., a computer-readable disk, a solid state memory device, or an optical storage device.

### Engineered Cells

[0106] Also provided herein are engineered cells that harbor one or more polymorphisms described herein, e.g., one or more response alleles. Such cells are useful for studying the effect of a polymorphism on physiological function, and for identifying and/or evaluating potential therapeutic agents such as anti-psychotics for the treatment of an SSD (e.g., SZ).

[0107] As one example, included herein are cells in which one or more of the various alleles of the genes described herein has be re-created that is associated with a response to a specific treatment. Methods are known in the art for generating cells, e.g., by homologous recombination between the endogenous gene and an exogenous DNA molecule introduced into a cell, e.g., a cell of an animal. In some cases, the cells can be used to generate transgenic animals using methods known in the art.

[0108] The cells are preferably mammalian cells (e.g., neuronal type cells) in which an endogenous gene has been altered to include a polymorphism as described herein. Techniques such as targeted homologous recombinations, can be used to insert the heterologous DNA as described in, e.g., Chappel, U.S. Pat. No. 5,272,071; WO 91/06667, published in May 16, 1991.

[0109] The invention is further described in the following examples, which do not limit the scope of the invention described in the claims.

### EXAMPLES

### Example 1

### Markers Associated with Drug Response

[0110] The Clinical Antipsychotic Trials of Intervention Effectiveness (CATIE), a large federally funded clinical trial designed to assess the efficacy of antipsychotics in a real world setting, is a valuable resource for determining the role of genes in drug response (Stroup et al., Schizophr. Bull. 29:15-31 (2003); Lieberman et al., N. Engl. J. Med. 353:1209-1223 (2005)). As part of the CATIE trial, SNP genotyping was performed for roughly half of the trial participants (Sullivan et al., Mol. Psychiatry. 13:570-584 (2008)). When combined with disease status, PANSS scores, and clinical drug response data, the genotyping data allows the identification of genetic variants (e.g., SNPs) that are statistically associated with specific responses to selected treatments.

[0111] The design of the CATIE study has been described in detail by others (see, e.g., Stroup et al., Schizophr. Bull. 29:15-31 (2003); Lieberman et al., N Engl. J. Med. 353:1209-1223 (2005)). Briefly, 1460 subjects were randomly assigned one of several antipsychotics and those who did not respond or chose to quit their current medication were re-randomized to another drug. Details regarding SNP genotyping and quality control have been recently published (Sullivan et al., Mol. Psychiatry. 13:570-584 (2008)).

[0112] Genotype and phenotype data for the CATIE trial were made available to qualified researchers through the NIMH Center for Collaborative Genetic Studies on Mental Disorders. Data for 417 patients with schizophrenia and 419 unaffected controls self reported as having exclusively European ancestry were evaluated. This same patient population was described in a recent study by Sullivan and coworkers, which confirmed that there is no hidden stratification in the sample (Sullivan et al., Mol. Psychiatry. 13:570-584 (2008)).

[0113] For the CATIE study, individual cases were diagnosed as having SZ based on DSM-III/IV criteria. All patients analyzed herein, either were taking the medication as their first antipsychotic medication or were randomly assigned at the start of the trial to a drug different from the one they were taking prior to enrollment in the CATIE Trial. This approach reflects a real world situation in which patients initiate therapy with a new drug, and eliminates the uncontrolled variable of time on the same drug prior to initiation of the study.

[0114] Treatment response for all patients was assessed using the Positive and Negative Syndrome Scale (PANSS) (Kay et al., Schizophr. Bull. 13:261-276 (1987); Kay et al., Br. J. Psychiatry Suppl 59-67 (1989); Leucht et al., Schizophr. Res. 79:231-238 (2005)). PANSS rating was performed at baseline (after a minimum 7 day drug free period) and at various time points throughout the study. The change in PANSS (delta PANSS) used here is the percent (%) change in PANSS is defined as [(PANSS_last observation−PANSS_baseline)/PANSS_basline]×100. To assess drug response, the last observation for each patient in treatment Phase 1 of the CATIE trial was used as a primary time point at which assessment of efficacy occurred.

[0115] An independent assessment of efficacy and tolerability is the time until discontinuation of drug treatment for all causes. This was the primary endpoint of the CATIE Trial (Lieberman et al., N Engl J Med 353(12):1209-23 (2005)). The longer the time to discontinuation for a given drug, the better the efficacy of the drug and its tolerability. The duration between a patient's first visit and last visit in Phase I of CATIE defined the time until discontinuation.

[0116] In addition to the quantitative time to discontinuation and delta PANSS, the CATIE consortium assigned dichotomous outcomes for patients who discontinued due to lack of efficacy due to adverse events.

[0117] Genetic analysis to document the influence of allelic variants on response to administration of olanzapine, risperidone, quetiapine, perphenazine, and ziprasidone, was performed using the PLINK 1.03 whole genome analysis toolset developed by Purcell and coworkers (Purcell et al., Am. J. Hum. Genet. 81:559-575 (2007)). For quantitative variables, PLINK calculates P values use a linear regression and an additive model for the minor allele. For dichotomous comparisons, PLINK calculates P values for the allele-specific chi-squared test and the odds ratio (OR; or relative risk) associated with the minor allele.

[0118] Confirmation of SNP Effects on DELTA PANSS for Various Drugs:

[0119] Tables 1-5 provide numerous examples of SNP-based alleles that predict altered response to olanzapine, risperidone, quetiapine, perphenazine and ziprasidone. Tables 1-5 report the test allele, P values, and Beta weights (in % PANSS) from the linear regression for SNPs that affect DELTA PANSS for each of olanzapine, risperidone, quetiapine, perphenazine and ziprasidone. A negative beta weight indicates that the allele is associated with a decrease in DELTA PANSS score, corresponding to greater improvement (or lowering) in symptom burden. A positive beta weight indicates that the allele is associated with an increase in DELTA PANSS score, corresponding to less improvement in symptom burden.

[0120] Confirmation of SNP Effects on Time to Discontinuation of Therapy:

[0121] Tables 6-10 provide numerous examples of SNP-based alleles that predict altered length of time until a discontinuation of various antipschotics (olanzapine, risperidone, quetiapine, perphenazine and ziprasidone). Tables 6-10 report the test allele, P values, and Beta weight from the linear regression for SNPs that affect Time to Discontinuation for each of olanzapine, risperidone, quetiapine, perphenazine and ziprasidone. A negative beta weight indicates a quicker time to discontinuation and a positive beta weight indicates an increased time to discontinuation.

[0122] Confirmation of SNP Effects on Likelihood of Discontinuing Therapy Due to Lack of Efficacy:

[0123] Tables 11-15 provide numerous examples of SNP-based alleles that predict altered likelihood of discontinuing therapy due to lack of efficacy for olanzapine, risperidone, quetiapine, perphenazine and ziprasidone. Tables 11-15 report the test allele, frequencies for discontinuers, P values, and ORs for SNPs that affect likelihood of discontinuing due to lack of efficacy for olanzapine, risperidone, quetiapine, perphenazine and ziprasidone. For Tables 11-15, ORs of >1.0 indicate that the minor SNP allele reported in the table is associated with greater likelihood of discontinuing due to lack of efficacy, and ORs of <1.0 indicate that the minor SNP allele is associated with lesser likelihood of discontinuing due to lack of efficacy.

### Confirmation of SNP Effects on Likelihood of Discontinuing Therapy Due to Serious Adverse Events:

[0124] Tables 16-20 provide numerous examples of SNP-based alleles that predict altered likelihood of discontinuing therapy due to serious adverse event for olanzapine, risperidone, quetiapine, perphenazine and ziprasidone. Tables 16-20 report the test allele, frequencies for discontinuers, P values, and ORs for SNPs that affect likelihood of discontinuing due to serious adverse event for olanzapine, risperidone, quetiapine, perphenazine and ziprasidone. For Tables 16-20, ORs of >1.0 indicate that the minor SNP allele is associated with greater likelihood of discontinuing due to serious adverse event, and ORs of <1.0 indicate that the minor SNP allele is associated with lesser likelihood of discontinuing due to serious adverse event.

### Other Embodiments

[0125] It is to be understood that while the invention has been described in conjunction with the detailed description thereof, the foregoing description is intended to illustrate and not limit the scope of the invention, which is defined by the scope of the appended claims. Other aspects, advantages, and modifications are within the scope of the following claims.

TABLE 1
Alleles Influencing Response to Olanzapine

| | Seq | NCBI | | Beta | |
|---|---|---|---|---|---|
| Gene | ID | RS # | Allele | (PANSS) | P |
| AGBL4-C1ORF165 | 25 | 11205517 | C | 26.81 | 0.008637 |
| AGBL4-C1ORF165 | 26 | 17373849 | A | 26.81 | 0.008637 |
| LRP8 | 54 | 12035926 | G | 10.76 | 0.035950 |
| PTGFRN | 90 | 17036573 | G | 57.40 | 0.008632 |
| PTGFRN | 91 | 12078461 | A | 57.40 | 0.008632 |
| SEC16B | 129 | 869286 | G | 10.78 | 0.048400 |
| USH2A | 155 | 6665313 | A | −12.77 | 0.022990 |
| USH2A | 156 | 12403674 | T | −12.77 | 0.022990 |
| ESRRG | 181 | 2820879 | A | 15.61 | 0.027360 |
| GNG4 | 193 | 508208 | G | −12.26 | 0.005302 |
| GNG4 | 195 | 2774327 | A | −12.57 | 0.002177 |
| FMN2 | 251 | 882869 | G | −10.90 | 0.037300 |
| RGS7 | 252 | 1970533 | C | −14.29 | 0.007357 |
| RGS7 | 254 | 4659581 | G | −16.79 | 0.002922 |
| BRE | 314 | 7558946 | T | 11.16 | 0.006172 |
| BRE | 315 | 6705961 | T | 11.05 | 0.008115 |
| BRE | 320 | 17006590 | C | 12.04 | 0.013590 |
| HAAO | 357 | 6738169 | G | 8.46 | 0.034550 |
| PLEKHH2 | 358 | 12623703 | G | −11.12 | 0.049400 |
| PLEKHH2 | 361 | 7570252 | A | −10.91 | 0.022780 |
| PRKCE | 378 | 1464572 | T | 11.40 | 0.031800 |
| PRKCE | 383 | 4953294 | A | −10.50 | 0.023400 |
| PRKCE | 384 | 4953297 | A | −10.42 | 0.024550 |
| PRKCE | 388 | 13024907 | C | −12.16 | 0.004725 |
| EPAS1 | 391 | 17034950 | A | 9.49 | 0.035380 |
| LRP1B | 513 | 9283437 | C | −10.37 | 0.031560 |
| LRP1B | 516 | 10178963 | A | −9.13 | 0.036270 |
| KYNU | 528 | 351673 | T | −11.00 | 0.019100 |
| KYNU | 536 | 6732786 | G | 12.56 | 0.018150 |
| KCNJ3 | 592 | 2971899 | C | 13.11 | 0.023670 |
| PDE1A | 642 | 16823124 | A | 19.39 | 0.001305 |
| PDE1A | 643 | 10497597 | T | 14.07 | 0.015900 |
| PDE1A | 648 | 9332425 | T | 16.21 | 0.002216 |
| PDE1A | 649 | 2082136 | G | −11.32 | 0.011860 |
| PDE1A | 650 | 2887208 | C | −10.20 | 0.018620 |
| ERBB4 | 681 | 7563759 | A | −11.08 | 0.009072 |
| ERBB4 | 682 | 4672666 | G | −8.45 | 0.031710 |
| ERBB4 | 683 | 4672668 | G | −8.37 | 0.036590 |
| ERBB4 | 684 | 4553767 | G | −17.12 | 0.000231 |
| COL4A4 | 692 | 4423583 | T | 9.79 | 0.021630 |
| COL4A4 | 695 | 10166736 | A | 9.65 | 0.022100 |
| COL4A3 | 710 | 11681636 | C | −10.03 | 0.029610 |
| ECEL1 | 729 | 12616972 | C | 9.24 | 0.025260 |
| CNTN6 | 742 | 265799 | G | −10.12 | 0.009883 |
| CNTN6 | 743 | 3821429 | G | −14.99 | 0.002884 |
| CNTN4 | 760 | 1153486 | T | 12.01 | 0.003993 |
| ITPR1 | 783 | 7432768 | G | −13.75 | 0.001128 |
| CLASP2 | 817 | 6781846 | G | −9.20 | 0.041530 |
| CLASP2 | 818 | 9311026 | C | −12.35 | 0.033540 |
| FHIT | 926 | 1470035 | A | −9.95 | 0.020820 |
| CADPS | 950 | 968808 | T | −11.00 | 0.014620 |
| FOXP1 | 985 | 2597312 | C | 9.24 | 0.032610 |
| CPNE4 | 1049 | 6792146 | A | 12.84 | 0.033130 |
| PLD1 | 1109 | 2178532 | A | 27.10 | 0.000304 |
| NLGN1 | 1111 | 10936764 | G | −10.27 | 0.045880 |
| NLGN1 | 1116 | 12635897 | C | 12.61 | 0.010760 |
| LRRC15 | 1149 | 4974536 | T | 11.58 | 0.017400 |
| LDB2 | 1175 | 189988 | T | −15.99 | 0.025250 |
| LDB2 | 1176 | 150260 | G | −15.99 | 0.025250 |
| LDB2 | 1177 | 157613 | G | −15.99 | 0.025250 |
| LDB2 | 1178 | 157611 | A | −13.58 | 0.044860 |
| SLIT2 | 1188 | 10516357 | A | 10.25 | 0.040900 |
| KIAA1239 | 1204 | 3910363 | C | 13.97 | 0.036390 |
| LOC389207 | 1229 | 13142149 | G | 9.34 | 0.043370 |
| LOC389207 | 1230 | 7656477 | G | −9.98 | 0.036830 |
| SHROOM3 | 1260 | 9307184 | G | −10.00 | 0.032290 |
| SCD5 | 1268 | 6852540 | C | 13.92 | 0.003715 |
| PDLIM5 | 1295 | 2452600 | T | −8.37 | 0.042030 |
| PDLIM5 | 1302 | 998071 | C | −9.77 | 0.025140 |
| TSPAN5 | 1303 | 2037797 | A | 12.68 | 0.049990 |
| COL25A1 | 1317 | 2305438 | A | 10.70 | 0.014390 |
| COL25A1 | 1322 | 1405145 | A | 11.70 | 0.011360 |
| COL25A1 | 1323 | 11729511 | C | 10.72 | 0.019110 |
| COL25A1 | 1324 | 3844177 | C | 10.72 | 0.019110 |
| COL25A1 | 1326 | 3851416 | T | 9.29 | 0.033010 |
| COL25A1 | 1332 | 2526456 | G | −11.06 | 0.018890 |
| COL25A1 | 1333 | 2704102 | C | −10.70 | 0.024410 |
| COL25A1 | 1334 | 987695 | G | −12.86 | 0.005477 |
| COL25A1 | 1335 | 7675657 | A | −13.36 | 0.003300 |
| COL25A1 | 1336 | 4256292 | G | −17.74 | 0.000304 |
| ANK2 | 1343 | 1989930 | G | −10.41 | 0.043040 |
| CAMK2D | 1366 | 7438925 | G | 10.60 | 0.022010 |
| NDST3 | 1371 | 6534079 | A | 12.83 | 0.018010 |
| NDST3 | 1375 | 4576085 | G | 18.13 | 0.005461 |
| PRSS12 | 1378 | 4834679 | T | 27.32 | 0.007368 |
| PRSS12 | 1379 | 1514657 | A | 27.32 | 0.007368 |
| POU4F2 | 1425 | 7680105 | G | 17.52 | 0.013670 |
| POU4F2 | 1429 | 1394279 | G | 15.00 | 0.043980 |
| POU4F2 | 1430 | 1979903 | C | 22.91 | 0.045640 |
| PALLD | 1496 | 2710827 | A | −8.79 | 0.033930 |
| PALLD | 1498 | 4425335 | G | 16.65 | 0.000779 |
| PALLD | 1499 | 12511925 | T | 20.22 | 0.006582 |
| PALLD | 1501 | 1039385 | G | 11.26 | 0.014000 |
| PALLD | 1502 | 1039386 | G | −10.24 | 0.034310 |
| DNAH5 | 1550 | 6554811 | G | 9.18 | 0.047670 |
| CDH10 | 1576 | 983446 | T | 14.13 | 0.006220 |
| SLC45A2 | 1578 | 10461928 | G | 11.86 | 0.048340 |
| SLC1A3 | 1583 | 3776569 | G | −9.80 | 0.032610 |
| EGFLAM | 1594 | 10214135 | C | 10.91 | 0.036670 |
| ITGA1 | 1601 | 11886 | G | 11.51 | 0.049160 |
| ITGA1 | 1608 | 7731949 | C | 10.39 | 0.048900 |
| ITGA1 | 1609 | 16880453 | C | 9.24 | 0.044500 |
| ITGA1 | 1611 | 923837 | T | 9.03 | 0.046160 |
| PDE4D | 1624 | 12654005 | G | −9.77 | 0.034230 |
| PDE4D | 1626 | 2910642 | C | −9.77 | 0.034230 |
| CMYA5 | 1653 | 259064 | C | 15.38 | 0.040600 |
| GPR98 | 1689 | 1878878 | A | −8.54 | 0.041940 |
| GPR98 | 1690 | 2222244 | A | −8.80 | 0.035060 |
| SNCAIP | 1751 | 17149141 | A | 15.51 | 0.011780 |
| VDAC1 | 1770 | 6878448 | A | −9.79 | 0.034530 |
| VDAC1 | 1771 | 13173424 | T | 10.59 | 0.012670 |
| ODZ2 | 1787 | 2337017 | C | 18.93 | 0.000877 |
| ODZ2 | 1789 | 1421989 | G | 18.93 | 0.000877 |
| SLC22A23 | 1812 | 17136575 | G | −12.07 | 0.045960 |
| ATXN1 | 1835 | 235147 | A | 11.75 | 0.004224 |
| SLC17A4 | 1849 | 4712972 | A | −19.00 | 0.033590 |
| SLC17A4 | 1851 | 1892253 | T | −19.00 | 0.033590 |
| MSH5 | 1875 | 707937 | G | 12.11 | 0.040310 |
| RIMS1 | 1901 | 482736 | C | 15.14 | 0.015910 |
| RIMS1 | 1902 | 1010326 | A | 12.38 | 0.035570 |
| RIMS1 | 1912 | 1339226 | G | −10.43 | 0.049680 |
| STX11 | 1995 | 6935462 | A | 31.15 | 0.016300 |
| TFB1M | 2011 | 7775163 | A | 9.98 | 0.016750 |
| PARK2 | 2017 | 2315321 | T | −8.99 | 0.036560 |
| PARK2 | 2019 | 992037 | T | −18.66 | 0.000191 |
| PARK2 | 2020 | 12055483 | T | −12.27 | 0.012430 |
| PARK2 | 2021 | 6924602 | C | −11.78 | 0.016730 |
| PARK2 | 2026 | 12528179 | C | −9.17 | 0.020990 |
| PARK2 | 2028 | 11752805 | A | −9.16 | 0.025170 |
| PARK2 | 2029 | 2155486 | T | −7.81 | 0.043870 |
| PARK2 | 2030 | 9295173 | G | 8.65 | 0.041320 |
| ETV1 | 2096 | 9639168 | C | −10.29 | 0.014260 |
| STK31 | 2111 | 12532929 | T | −18.18 | 0.002355 |
| STK31 | 2113 | 2390813 | G | −8.82 | 0.038370 |
| CHN2 | 2127 | 245927 | G | −9.77 | 0.021040 |
| SCRN1 | 2130 | 6976421 | A | 9.15 | 0.046930 |
| PLEKHA8 | 2134 | 10275475 | C | 12.76 | 0.011990 |
| SCRN1 | 2136 | 1465327 | T | 11.68 | 0.023910 |
| VPS41 | 2173 | 2286105 | A | −17.06 | 0.004040 |
| VPS41 | 2174 | 2074655 | T | −17.06 | 0.004040 |
| VPS41 | 2175 | 17768153 | A | −17.06 | 0.004040 |
| VPS41 | 2176 | 3801140 | C | −10.04 | 0.026070 |
| VPS41 | 2178 | 4723793 | G | 10.82 | 0.028270 |
| ABCA13 | 2205 | 10273407 | C | 19.32 | 0.002663 |
| ABCA13 | 2213 | 10216298 | G | 16.64 | 0.015780 |
| WBSCR17 | 2236 | 12666361 | A | 9.68 | 0.046600 |
| HIP1 | 2256 | 17352471 | A | 18.55 | 0.000415 |
| MAGI2 | 2268 | 3807797 | T | 14.32 | 0.015060 |
| MAGI2 | 2269 | 3779305 | A | −9.96 | 0.041220 |
| MAGI2 | 2279 | 848913 | C | −13.15 | 0.031560 |
| MAGI2 | 2289 | 6971099 | T | −10.77 | 0.048300 |
| MAGI2 | 2292 | 10280554 | T | 13.89 | 0.045990 |
| MAGI2 | 2293 | 848934 | C | −15.70 | 0.008896 |
| MAGI2 | 2300 | 10248584 | G | −13.24 | 0.030650 |
| GNAI1 | 2302 | 2462131 | G | 9.84 | 0.047780 |
| SEMA3E | 2335 | 2713154 | G | −11.74 | 0.006444 |
| SEMA3E | 2339 | 2713174 | C | −14.11 | 0.000976 |
| SEMA3E | 2340 | 2249188 | G | 12.81 | 0.001285 |
| SEMA3E | 2341 | 10270844 | T | 10.15 | 0.019010 |
| ABCB4 | 2350 | 31658 | T | 16.07 | 0.022220 |
| ABCB4 | 2351 | 31662 | A | 15.43 | 0.022530 |
| ADAM22 | 2357 | 2282949 | C | −15.09 | 0.000817 |
| ADAM22 | 2358 | 6951172 | T | −9.25 | 0.034180 |
| ADAM22 | 2359 | 9632709 | C | −9.25 | 0.034180 |
| PON1 | 2366 | 662 | G | −13.91 | 0.004692 |
| PPP1R9A | 2370 | 4729174 | A | 10.06 | 0.031200 |
| PPP1R9A | 2371 | 7806304 | C | 8.99 | 0.049990 |
| PPP1R9A | 2375 | 12690919 | T | −9.58 | 0.030100 |
| PPP1R9A | 2376 | 854520 | T | −10.75 | 0.010670 |
| PON1 | 2382 | 2057681 | G | −14.04 | 0.004888 |
| PON1 | 2383 | 2299257 | C | −10.20 | 0.032230 |
| EMID2 | 2402 | 6947185 | C | −11.40 | 0.017800 |
| CUX1 | 2404 | 2960266 | A | 9.89 | 0.028890 |
| KCND2 | 2414 | 7795646 | G | −13.25 | 0.037660 |
| TBXAS1 | 2485 | 41723 | G | 10.56 | 0.041190 |
| CNTNAP2 | 2499 | 826824 | C | −11.70 | 0.028820 |
| CNTNAP2 | 2502 | 2022226 | C | −10.70 | 0.031970 |
| CSMD1 | 2541 | 13272021 | C | −14.73 | 0.026830 |
| CSMD1 | 2543 | 13260434 | A | −13.61 | 0.034730 |
| CSMD1 | 2545 | 13254344 | T | 15.79 | 0.000870 |
| CSMD1 | 2546 | 895696 | T | 15.79 | 0.000870 |
| CSMD1 | 2547 | 895695 | A | 15.79 | 0.000870 |
| CSMD1 | 2550 | 4493928 | A | 13.62 | 0.038940 |
| MCPH1 | 2551 | 1530408 | C | −11.75 | 0.031210 |
| MCPH1 | 2552 | 3020270 | T | −17.26 | 0.005508 |
| MCPH1 | 2554 | 2083914 | T | −16.11 | 0.010990 |
| MCPH1 | 2555 | 1054073 | T | −12.38 | 0.022760 |
| MCPH1 | 2556 | 2034143 | T | −13.36 | 0.023840 |
| MCPH1 | 2557 | 2922818 | T | −12.53 | 0.042330 |
| MCPH1 | 2561 | 2442496 | G | −11.11 | 0.044010 |
| ATP6V1B2 | 2616 | 13252207 | A | −12.69 | 0.017010 |
| ATP6V1B2 | 2617 | 11204102 | G | −10.93 | 0.014960 |
| GFRA2 | 2619 | 4506202 | G | 9.31 | 0.030150 |
| UNC5D | 2637 | 16884099 | G | −19.56 | 0.010900 |
| UNC5D | 2638 | 16884109 | G | −19.56 | 0.010900 |
| UNC5D | 2639 | 6989128 | A | −15.88 | 0.035710 |
| SNTG1 | 2661 | 12545915 | T | 11.48 | 0.018550 |
| NKAIN3 | 2707 | 16929516 | T | −13.15 | 0.031760 |
| NKAIN3 | 2716 | 4739023 | C | −9.81 | 0.045840 |
| NKAIN3 | 2723 | 10957263 | C | −18.48 | 0.012950 |
| KCNB2 | 2736 | 349358 | G | 12.83 | 0.046360 |
| KCNB2 | 2737 | 349355 | T | 12.83 | 0.046360 |
| MMP16 | 2764 | 6994019 | T | 10.12 | 0.041750 |
| NCALD | 2782 | 7830291 | C | 10.43 | 0.042310 |
| FER1L6 | 2840 | 9987271 | T | 14.30 | 0.003106 |
| FER1L6 | 2845 | 2069078 | C | −13.52 | 0.030900 |
| MTSS1 | 2854 | 4870913 | T | −13.67 | 0.049320 |
| DDEF1 | 2859 | 7003309 | C | −10.13 | 0.014770 |
| ADCY8 | 2889 | 17248206 | G | −9.75 | 0.034640 |
| SMARCA2 | 2928 | 7872216 | T | −11.12 | 0.045320 |
| PTPRD | 2939 | 3858060 | T | −14.90 | 0.001771 |
| PTPRD | 2940 | 3843579 | C | −14.90 | 0.001771 |
| KIAA1797 | 2960 | 7848159 | G | 18.05 | 0.019460 |
| KIAA1797 | 2961 | 7021708 | G | −11.87 | 0.007420 |
| KIAA1797 | 2962 | 2151002 | A | 14.39 | 0.002859 |
| KIAA1797 | 2963 | 10511687 | G | −10.33 | 0.032580 |
| KIAA1797 | 2967 | 6475483 | T | 18.99 | 0.000501 |
| KIAA1797 | 2968 | 10738569 | A | 18.08 | 0.001234 |
| KIAA1797 | 2969 | 7049134 | G | 18.24 | 0.001512 |
| KIAA1797 | 2970 | 2383162 | G | 16.26 | 0.000090 |
| KIAA1797 | 2971 | 4246849 | A | 19.56 | 0.000004 |
| KIAA1797 | 2972 | 4977823 | T | 19.25 | 0.000004 |
| KIAA1797 | 2973 | 6475490 | G | −9.06 | 0.032340 |
| KIAA1797 | 2975 | 4579612 | C | −9.49 | 0.036220 |
| KIAA1797 | 2976 | 4977848 | A | 17.87 | 0.000012 |
| KIAA1797 | 2977 | 7025851 | G | −8.64 | 0.041590 |
| KIAA1797 | 2981 | 4272463 | C | −9.98 | 0.019590 |
| TEK | 2990 | 1322051 | A | 23.07 | 0.014890 |
| PIP5K1B | 2999 | 872077 | A | −12.84 | 0.023790 |
| TMC1 | 3027 | 6560285 | T | −10.98 | 0.022740 |
| TMC1 | 3030 | 6560293 | A | 11.46 | 0.005511 |
| TMC1 | 3035 | 1417614 | T | −10.15 | 0.048480 |
| TRPM6 | 3045 | 7045338 | T | −10.21 | 0.033640 |
| TRPM6 | 3046 | 7859201 | C | −9.95 | 0.047940 |
| DIRAS2 | 3088 | 7028171 | A | 10.80 | 0.041780 |
| FKTN | 3111 | 2518128 | A | 9.00 | 0.049110 |
| PALM2 | 3117 | 17202329 | C | −11.60 | 0.025810 |
| PALM2 | 3118 | 736502 | T | −11.60 | 0.025810 |
| PALM2 | 3119 | 7849027 | G | −11.60 | 0.025810 |
| PALM2 | 3120 | 10980027 | A | −11.42 | 0.026120 |
| SVEP1 | 3124 | 963143 | A | 9.53 | 0.026250 |
| RALGPS1 | 3151 | 546493 | G | −10.21 | 0.049650 |
| RALGPS1 | 3160 | 10987576 | A | 13.92 | 0.030100 |
| SLC25A25 | 3161 | 7873492 | T | −15.90 | 0.018590 |
| SLC25A25 | 3162 | 9695803 | C | −12.88 | 0.042060 |
| VAV2 | 3187 | 7038256 | T | −17.52 | 0.018840 |
| VAV2 | 3188 | 12001180 | G | −14.19 | 0.022620 |
| OLFM1 | 3193 | 10776933 | T | 10.53 | 0.030380 |
| OLFM1 | 3194 | 2031825 | A | 9.90 | 0.042720 |
| PRKCQ | 3229 | 1889001 | A | −9.33 | 0.041640 |
| SLC16A9 | 3294 | 10128501 | G | −9.64 | 0.026350 |
| CDH23 | 3304 | 1417207 | G | 11.74 | 0.032910 |
| KCNMA1 | 3322 | 1907729 | T | −11.52 | 0.048920 |
| KCNMA1 | 3325 | 10509378 | T | 10.47 | 0.032570 |
| VTI1A | 3399 | 7918958 | G | −11.04 | 0.017060 |
| VTI1A | 3400 | 7342028 | T | −11.33 | 0.019300 |
| VTI1A | 3403 | 11196083 | T | −11.18 | 0.022540 |
| VTI1A | 3404 | 7068695 | C | −8.61 | 0.045770 |
| VTI1A | 3405 | 4145776 | G | −9.41 | 0.043560 |
| ATE1 | 3448 | 2420970 | T | 10.04 | 0.016610 |
| ATE1 | 3449 | 11200251 | T | 11.70 | 0.017210 |
| CTBP2 | 3455 | 9422765 | G | 10.58 | 0.029640 |
| CTBP2 | 3456 | 7896555 | G | 10.58 | 0.029640 |
| ARNTL | 3492 | 10832020 | C | 10.48 | 0.034040 |
| SPON1 | 3499 | 1528668 | C | −9.30 | 0.029390 |
| SPON1 | 3501 | 11023054 | A | −9.41 | 0.030010 |
| SPON1 | 3502 | 10832165 | A | −9.02 | 0.034340 |
| SPON1 | 3503 | 7112850 | A | −9.02 | 0.034340 |
| SPON1 | 3504 | 10766134 | G | −9.02 | 0.034340 |
| ELMOD1 | 3559 | 683266 | A | −10.43 | 0.019420 |
| TSPAN9 | 3594 | 4304861 | G | 10.42 | 0.019420 |
| TMEM16B | 3606 | 11063913 | G | −10.24 | 0.047260 |
| CNOT2 | 3643 | 1595410 | C | 8.95 | 0.043750 |
| KCNC2 | 3655 | 6582260 | C | −11.97 | 0.031940 |
| KCNC2 | 3658 | 1526821 | C | −15.91 | 0.003126 |
| KCNC2 | 3659 | 10785167 | T | −10.21 | 0.031070 |
| MTIF3 | 3691 | 9805452 | A | −18.01 | 0.001309 |
| MTIF3 | 3692 | 7334690 | A | −16.39 | 0.001186 |
| TRPC4 | 3725 | 7336008 | A | 9.27 | 0.017370 |
| TRPC4 | 3726 | 4943529 | C | 9.43 | 0.028090 |
| TRPC4 | 3727 | 7319926 | A | −12.39 | 0.010750 |
| TRPC4 | 3728 | 9532107 | A | −13.34 | 0.003121 |
| TRPC4 | 3732 | 1538146 | T | 13.40 | 0.015790 |
| GPC5 | 3777 | 1537027 | T | −10.08 | 0.036720 |
| GPC5 | 3780 | 2352195 | T | 11.44 | 0.010230 |
| GPC5 | 3781 | 2352199 | C | 11.68 | 0.009241 |
| GPC5 | 3782 | 7321674 | A | 11.68 | 0.009241 |
| GPC6 | 3804 | 3848066 | C | 12.06 | 0.018980 |
| GPC6 | 3805 | 4085921 | G | 13.48 | 0.005165 |
| GPC6 | 3806 | 1330620 | A | 14.43 | 0.002196 |
| GPC6 | 3807 | 9589816 | A | 13.61 | 0.002511 |
| GPC6 | 3810 | 7993501 | C | 12.29 | 0.003483 |
| NPAS3 | 3873 | 6571605 | A | 13.29 | 0.012170 |
| NPAS3 | 3874 | 10150948 | A | −11.54 | 0.003906 |
| NPAS3 | 3876 | 2183276 | G | 10.81 | 0.004129 |
| SAMD4A | 3913 | 709939 | C | −8.97 | 0.045570 |
| SAMD4A | 3914 | 3813402 | A | −11.64 | 0.032790 |
| PSMC1 | 3970 | 2236403 | T | −8.85 | 0.039710 |
| RPS6KA5 | 3972 | 1152423 | C | −10.75 | 0.026310 |
| BCL11B | 4000 | 2793321 | T | −16.67 | 0.001161 |
| BCL11B | 4001 | 1257446 | C | −17.33 | 0.000895 |
| BCL11B | 4002 | 1257416 | G | −15.04 | 0.007450 |
| BCL11B | 4003 | 2614463 | T | −9.46 | 0.023430 |
| C15ORF41 | 4042 | 16964046 | T | −28.30 | 0.001232 |
| C15ORF41 | 4043 | 16964049 | T | −28.01 | 0.001237 |
| C15ORF41 | 4044 | 1210459 | T | −13.82 | 0.018830 |
| C15ORF41 | 4045 | 16964103 | T | −28.01 | 0.001237 |
| C15ORF41 | 4046 | 16964104 | G | −28.01 | 0.001237 |
| C15ORF41 | 4047 | 17508461 | T | −28.01 | 0.001237 |
| GLDN | 4057 | 16964316 | A | 41.39 | 0.001055 |
| GLDN | 4059 | 16964319 | T | 41.39 | 0.001055 |
| GLDN | 4060 | 10163098 | G | 41.39 | 0.001055 |
| GLDN | 4061 | 12443092 | C | 41.39 | 0.001055 |
| A2BP1 | 4132 | 12922392 | T | −10.91 | 0.021710 |
| TMC5 | 4139 | 1985395 | C | −9.92 | 0.043410 |
| KIFC3 | 4149 | 874503 | A | −20.34 | 0.049910 |
| CRISPLD2 | 4214 | 2934477 | A | 10.01 | 0.022330 |
| ALOX12B | 4218 | 9914077 | G | 9.66 | 0.040330 |
| SDK2 | 4262 | 1846334 | A | 12.03 | 0.015780 |
| DNAH17 | 4268 | 9302876 | A | 10.92 | 0.033350 |
| PTPRM | 4291 | 1893224 | C | 21.61 | 0.036710 |
| CHST9 | 4317 | 4800797 | G | 12.16 | 0.012590 |
| RNF24 | 4393 | 6084530 | C | 9.94 | 0.026400 |
| FERMT1 | 4409 | 6085406 | A | 9.69 | 0.031810 |
| PLCB1 | 4416 | 6055678 | T | 12.32 | 0.023540 |
| MACROD2 | 4452 | 6043402 | A | −25.18 | 0.014090 |
| KIF16B | 4462 | 6043875 | C | −12.97 | 0.017340 |
| MIRN155 | 4553 | 9977556 | C | 14.13 | 0.007401 |
| ASPHD2 | 4573 | 16982107 | T | −22.28 | 0.018950 |
| TTLL1 | 4591 | 5759120 | T | −22.96 | 0.045150 |
| TTLL1 | 4594 | 135001 | C | −9.57 | 0.027900 |
| TTLL1 | 4595 | 135002 | C | −9.57 | 0.027900 |
| EFCAB6 | 4598 | 9614382 | G | −10.77 | 0.037170 |
| EFCAB6 | 4600 | 2374773 | A | −11.83 | 0.016230 |
| EFCAB6 | 4605 | 137794 | A | 22.20 | 0.001550 |
| EFCAB6 | 4608 | 137821 | G | 13.40 | 0.015660 |
| EFCAB6 | 4613 | 5764302 | G | 18.51 | 0.003064 |
| EFCAB6 | 4614 | 5764310 | C | 18.29 | 0.002464 |

TABLE 2
Alleles Influencing Response to Risperidone

| | | | | Beta | |
|---|---|---|---|---|---|
| Gene | Seq ID | NCBI RS# | Allele | (PANSS) | P |
| AGBL4-C1ORF165 | 27 | 1934395 | G | −16.73 | 0.0003 |
| AGBL4-C1ORF165 | 30 | 1934368 | C | −15.54 | 0.0012 |
| AGBL4-C1ORF165 | 32 | 5017079 | T | −17.26 | 0.0015 |
| AGBL4-C1ORF165 | 34 | 3121522 | A | −11.55 | 0.0067 |
| AGBL4-C1ORF165 | 35 | 12043418 | T | −10.43 | 0.0180 |
| AGBL4-C1ORF165 | 36 | 2355693 | T | −15.94 | 0.0016 |
| SYT6 | 79 | 500739 | T | −9.31 | 0.0175 |
| SLC22A15 | 85 | 7547928 | T | 9.84 | 0.0242 |
| SLC22A15 | 86 | 2051060 | C | 9.84 | 0.0242 |
| RALGPS2 | 131 | 4652319 | T | 8.61 | 0.0445 |
| KCNK2 | 140 | 10779634 | T | 8.49 | 0.0478 |
| USH2A | 169 | 700024 | G | 13.89 | 0.0332 |
| ESRRG | 175 | 10495027 | A | −11.08 | 0.0345 |
| SLC35F3 | 189 | 480993 | T | −8.61 | 0.0305 |
| RYR2 | 211 | 651250 | C | −11.65 | 0.0071 |
| KCNF1 | 287 | 16856887 | T | −10.77 | 0.0096 |
| PLEKHH2 | 360 | 12621654 | T | 12.51 | 0.0072 |
| C2ORF34 | 366 | 1067402 | T | −10.97 | 0.0289 |
| C2ORF34 | 367 | 698792 | A | −10.07 | 0.0428 |
| C2ORF34 | 375 | 11679997 | T | −17.19 | 0.0050 |
| EPAS1 | 392 | 4953340 | C | 8.83 | 0.0194 |
| CCDC85A | 428 | 1030091 | C | 15.59 | 0.0367 |
| CTNNA2 | 445 | 2566542 | C | 10.44 | 0.0477 |
| CTNNA2 | 452 | 1319241 | A | −11.61 | 0.0458 |
| CTNNA2 | 455 | 1443895 | A | −7.74 | 0.0479 |
| CTNNA2 | 469 | 731359 | C | 8.22 | 0.0347 |
| INPP4A | 474 | 17032120 | T | 10.14 | 0.0148 |
| INPP4A | 475 | 2278206 | C | 8.72 | 0.0332 |
| NXPH2 | 498 | 10928662 | T | 12.92 | 0.0120 |
| LRP1B | 511 | 1949871 | C | −7.89 | 0.0442 |
| ARHGAP15 | 538 | 11895997 | A | −8.99 | 0.0195 |
| ARHGAP15 | 541 | 6719609 | A | 12.89 | 0.0112 |
| ARHGAP15 | 543 | 9677486 | G | 12.52 | 0.0140 |
| ARHGAP15 | 545 | 7605182 | C | 12.36 | 0.0200 |
| ARHGAP15 | 546 | 17814502 | A | 12.14 | 0.0187 |
| KIF5C | 564 | 6755213 | A | 15.31 | 0.0185 |
| FMNL2 | 588 | 2272535 | G | −13.74 | 0.0376 |
| SCN3A | 615 | 10930148 | G | −9.99 | 0.0333 |
| SCN3A | 618 | 11677254 | C | −10.12 | 0.0125 |
| PDE1A | 638 | 2623422 | G | −9.80 | 0.0371 |
| PDE1A | 647 | 7601804 | T | −10.61 | 0.0400 |
| PARD3B | 664 | 1100393 | G | 10.79 | 0.0134 |
| IRS1 | 688 | 2288587 | C | 24.29 | 0.0270 |
| IRS1 | 689 | 16822570 | G | 24.29 | 0.0270 |
| COL4A3 | 710 | 11681636 | C | −11.42 | 0.0034 |
| SAG | 731 | 3792096 | T | −11.29 | 0.0093 |
| CNTN6 | 734 | 4362705 | A | 9.55 | 0.0285 |
| CNTN6 | 735 | 6798321 | C | 8.70 | 0.0271 |
| CNTN6 | 736 | 11925058 | C | 8.74 | 0.0412 |
| CNTN6 | 752 | 3915436 | A | −12.04 | 0.0034 |
| CNTN4 | 756 | 1523320 | C | −9.80 | 0.0174 |
| CNTN4 | 760 | 1153486 | T | −10.35 | 0.0368 |
| CNTN4 | 769 | 9823500 | C | 13.42 | 0.0087 |
| ITPR1 | 774 | 304073 | G | −11.23 | 0.0042 |
| ITPR1 | 775 | 304038 | G | −7.95 | 0.0479 |
| DAZL | 800 | 12233472 | G | 9.07 | 0.0376 |
| DAZL | 803 | 13064112 | G | 8.86 | 0.0446 |
| ULK4 | 847 | 1795346 | C | 19.72 | 0.0143 |
| GPX1 | 855 | 9814873 | G | 14.07 | 0.0013 |
| GPX1 | 856 | 1801143 | T | 14.07 | 0.0013 |
| GPX1 | 857 | 9827708 | G | 13.53 | 0.0022 |
| GPX1 | 858 | 2271961 | C | −8.06 | 0.0278 |
| GPX1 | 859 | 2352974 | T | −7.77 | 0.0396 |
| CACNA2D3 | 873 | 17054586 | C | 13.91 | 0.0260 |
| ERC2 | 881 | 7617962 | T | 13.09 | 0.0069 |
| ERC2 | 882 | 1993539 | T | 17.98 | 0.0004 |
| ERC2 | 883 | 9810436 | A | 9.80 | 0.0301 |
| ERC2 | 886 | 7614271 | G | 19.29 | 0.0012 |
| ERC2 | 887 | 4974168 | C | 15.79 | 0.0084 |
| ERC2 | 889 | 2316481 | A | 18.68 | 0.0171 |
| IL17RD | 905 | 747089 | T | 12.09 | 0.0073 |
| FHIT | 927 | 9858223 | A | 11.91 | 0.0029 |
| FHIT | 928 | 4688167 | C | 11.91 | 0.0029 |
| PRICKLE2 | 957 | 17069879 | A | −12.65 | 0.0047 |
| MAGI1 | 972 | 4234687 | A | 11.95 | 0.0219 |
| MAGI1 | 975 | 7612644 | A | 8.94 | 0.0493 |
| GBE1 | 989 | 17019088 | T | 12.40 | 0.0161 |
| GBE1 | 991 | 13324454 | G | −11.00 | 0.0147 |
| GBE1 | 994 | 9871474 | T | −9.70 | 0.0394 |
| EPHA6 | 1007 | 6439203 | G | 16.23 | 0.0104 |
| EPHA6 | 1009 | 2317212 | A | 10.35 | 0.0420 |
| PLCXD2 | 1011 | 6788543 | C | 8.27 | 0.0455 |
| KALRN | 1044 | 333354 | A | −8.82 | 0.0406 |
| CPNE4 | 1048 | 1385969 | C | −10.36 | 0.0283 |
| SPSB4 | 1082 | 11915229 | G | 16.56 | 0.0428 |
| SERPINI1 | 1091 | 13090569 | A | −10.04 | 0.0277 |
| SLC7A14 | 1093 | 6788596 | G | 11.57 | 0.0108 |
| SLC7A14 | 1096 | 17289598 | G | 16.07 | 0.0156 |
| TNIK | 1099 | 4955765 | G | 7.70 | 0.0422 |
| TNIK | 1102 | 17217552 | G | −29.57 | 0.0346 |
| IL1RAP | 1141 | 3773999 | C | 10.31 | 0.0280 |
| IL1RAP | 1142 | 9990231 | C | 9.40 | 0.0467 |
| SLC2A9 | 1156 | 2139243 | C | −9.60 | 0.0425 |
| SLIT2 | 1185 | 7655084 | G | 9.48 | 0.0438 |
| PCDH7 | 1199 | 10517215 | A | −13.99 | 0.0252 |
| NPFFR2 | 1235 | 11936367 | G | −9.41 | 0.0401 |
| NPFFR2 | 1248 | 9790741 | G | 8.50 | 0.0480 |
| PAPSS1 | 1308 | 4956020 | T | 11.46 | 0.0266 |
| PAPSS1 | 1309 | 12502059 | A | 11.82 | 0.0226 |
| COL25A1 | 1321 | 1563004 | G | 14.34 | 0.0420 |
| ANK2 | 1348 | 362496 | G | −13.64 | 0.0032 |
| GPR103 | 1382 | 2013332 | A | −10.22 | 0.0382 |
| MAML3 | 1392 | 10024138 | T | 8.89 | 0.0486 |
| MAML3 | 1393 | 12512994 | T | 8.99 | 0.0500 |
| FSTL5 | 1460 | 2082669 | G | 14.31 | 0.0077 |
| TLL1 | 1479 | 3756016 | C | −10.74 | 0.0146 |
| TLL1 | 1480 | 2292083 | A | −10.46 | 0.0167 |
| ENPP6 | 1527 | 6830766 | G | 8.79 | 0.0263 |
| ENPP6 | 1528 | 10020224 | G | 11.04 | 0.0089 |
| SEMA5A | 1541 | 11134354 | A | 9.74 | 0.0454 |
| DNAH5 | 1553 | 7715811 | T | 10.04 | 0.0404 |
| DNAH5 | 1554 | 1502050 | G | 9.91 | 0.0456 |
| CDH10 | 1575 | 3822429 | T | −8.78 | 0.0313 |
| SLC45A2 | 1579 | 35389 | G | 16.41 | 0.0135 |
| SLC1A3 | 1586 | 6451305 | C | 10.80 | 0.0389 |
| ITGA1 | 1615 | 1047481 | G | 8.75 | 0.0404 |
| TNPO1 | 1644 | 2548331 | A | −10.68 | 0.0039 |
| FCHO2 | 1645 | 478575 | T | 9.86 | 0.0094 |
| FCHO2 | 1647 | 6895786 | G | 9.44 | 0.0173 |
| FCHO2 | 1648 | 7727222 | C | 9.44 | 0.0173 |
| FCHO2 | 1649 | 7709974 | A | 9.51 | 0.0184 |
| VCAN | 1669 | 309559 | T | 9.16 | 0.0447 |
| VCAN | 1670 | 160277 | A | −8.27 | 0.0453 |
| CAST | 1694 | 754615 | C | 8.91 | 0.0479 |
| FBXL17 | 1701 | 288172 | C | −13.10 | 0.0099 |
| FBXL17 | 1702 | 288144 | A | −13.10 | 0.0099 |
| FBXL17 | 1712 | 1849012 | A | −13.48 | 0.0085 |
| FBXL17 | 1713 | 17161232 | T | −12.07 | 0.0179 |
| FBXL17 | 1714 | 6594298 | A | −12.07 | 0.0179 |
| KCNN2 | 1729 | 6889371 | G | −14.35 | 0.0154 |
| KCNN2 | 1730 | 4435855 | A | 9.87 | 0.0478 |
| SEMA6A | 1732 | 26591 | A | 8.14 | 0.0346 |
| SEMA6A | 1735 | 254231 | G | −8.30 | 0.0446 |
| ODZ2 | 1799 | 1422421 | T | −11.09 | 0.0130 |
| NEDD9 | 1815 | 3798729 | T | −15.48 | 0.0046 |
| PHACTR1 | 1817 | 6458439 | C | 9.22 | 0.0253 |
| JARID2 | 1827 | 707833 | C | −10.12 | 0.0155 |
| PPP2R5D | 1882 | 6901782 | C | 12.17 | 0.0380 |
| RIMS1 | 1907 | 1015945 | G | 9.23 | 0.0430 |
| RIMS1 | 1908 | 9351903 | G | −9.48 | 0.0287 |
| RIMS1 | 1910 | 10498882 | G | −8.78 | 0.0330 |
| RIMS1 | 1912 | 1339226 | G | −12.54 | 0.0079 |
| RIMS1 | 1913 | 1546914 | T | −10.86 | 0.0165 |
| TRDN | 1935 | 13190807 | C | 10.08 | 0.0325 |
| TRDN | 1939 | 1431284 | G | −8.49 | 0.0331 |
| TRDN | 1940 | 17686735 | G | −8.91 | 0.0282 |
| PDE7B | 1987 | 6938424 | T | 27.27 | 0.0252 |
| PLAGL1 | 1992 | 9376803 | G | 9.95 | 0.0087 |
| PLAGL1 | 1993 | 9484836 | A | 12.76 | 0.0044 |
| UTRN | 1997 | 601873 | A | 9.86 | 0.0196 |
| UTRN | 2000 | 9390166 | G | 12.61 | 0.0018 |
| UTRN | 2001 | 7765923 | A | 11.35 | 0.0097 |
| PACRG | 2051 | 742956 | G | 10.81 | 0.0086 |
| PACRG | 2053 | 761625 | A | −9.55 | 0.0303 |
| PDE10A | 2057 | 1706123 | C | 9.07 | 0.0198 |
| CARD11 | 2069 | 4722277 | T | −9.49 | 0.0333 |
| SDK1 | 2072 | 11766511 | G | 8.33 | 0.0324 |
| SDK1 | 2075 | 649186 | C | −11.40 | 0.0470 |
| SDK1 | 2082 | 1044701 | A | −8.12 | 0.0443 |
| ETV1 | 2098 | 4721291 | C | 10.36 | 0.0126 |
| ETV1 | 2099 | 2237295 | G | −11.17 | 0.0181 |
| STK31 | 2110 | 10264967 | T | −12.28 | 0.0397 |
| CREB5 | 2125 | 4722864 | A | −11.11 | 0.0436 |
| SCRN1 | 2130 | 6976421 | A | −13.32 | 0.0059 |
| SCRN1 | 2131 | 6976789 | T | −10.14 | 0.0331 |
| SCRN1 | 2132 | 4662 | T | −10.14 | 0.0331 |
| PLEKHA8 | 2134 | 10275475 | C | −10.28 | 0.0454 |
| PDE1C | 2156 | 7790003 | C | −7.65 | 0.0332 |
| BMPER | 2164 | 6975236 | T | −10.77 | 0.0092 |
| VPS41 | 2173 | 2286105 | A | 16.65 | 0.0095 |
| VPS41 | 2176 | 3801140 | C | 10.11 | 0.0201 |
| VPS41 | 2177 | 3801139 | T | 10.11 | 0.0201 |
| VPS41 | 2180 | 12674115 | G | 14.84 | 0.0052 |
| GRB10 | 2220 | 2074777 | G | 8.95 | 0.0190 |
| GRB10 | 2221 | 757774 | G | 13.84 | 0.0021 |
| GRB10 | 2222 | 6593164 | C | 13.84 | 0.0021 |
| GRB10 | 2223 | 10281065 | A | 13.84 | 0.0021 |
| GRB10 | 2225 | 6943901 | G | 13.84 | 0.0021 |
| GRB10 | 2226 | 6971834 | T | 13.84 | 0.0021 |
| WBSCR17 | 2241 | 740099 | C | 13.86 | 0.0052 |
| WBSCR17 | 2243 | 7794574 | A | 14.82 | 0.0070 |
| HIP1 | 2260 | 1015877 | C | −9.21 | 0.0165 |
| HIP1 | 2261 | 2696213 | T | −13.55 | 0.0006 |
| HIP1 | 2263 | 2253020 | G | −12.68 | 0.0013 |
| HIP1 | 2264 | 11770686 | T | 11.72 | 0.0028 |
| MAGI2 | 2275 | 38110 | C | −9.60 | 0.0162 |
| MAGI2 | 2285 | 2191806 | C | −11.70 | 0.0465 |
| CACNA2D1 | 2313 | 12531682 | T | 8.70 | 0.0412 |
| CACNA2D1 | 2315 | 7788848 | A | 8.92 | 0.0360 |
| CACNA2D1 | 2317 | 6952949 | G | −9.80 | 0.0201 |
| PCLO | 2319 | 10232216 | T | 10.76 | 0.0080 |
| SEMA3E | 2336 | 2713151 | T | −8.37 | 0.0470 |
| SEMA3E | 2337 | 2709890 | A | −8.37 | 0.0470 |
| ADAM22 | 2355 | 1688886 | G | −8.72 | 0.0436 |
| ADAM22 | 2356 | 2282948 | C | −8.42 | 0.0456 |
| ADAM22 | 2357 | 2282949 | C | −8.42 | 0.0456 |
| KCND2 | 2413 | 4727911 | G | −10.75 | 0.0226 |
| KCND2 | 2414 | 7795646 | G | −10.75 | 0.0226 |
| GRM8 | 2442 | 6950264 | G | 10.70 | 0.0116 |
| GRM8 | 2452 | 1361956 | A | 9.55 | 0.0178 |
| EXOC4 | 2467 | 10247014 | T | 8.60 | 0.0370 |
| EXOC4 | 2468 | 10279261 | G | 8.90 | 0.0241 |
| EXOC4 | 2471 | 4731992 | A | 11.91 | 0.0148 |
| DGKI | 2475 | 16874961 | C | 10.64 | 0.0245 |
| DGKI | 2476 | 12535157 | A | 9.39 | 0.0383 |
| PTPRN2 | 2515 | 10263303 | T | 11.16 | 0.0202 |
| CSMD1 | 2539 | 12541278 | T | −9.41 | 0.0194 |
| MCPH1 | 2568 | 2959799 | C | −8.76 | 0.0245 |
| MCPH1 | 2570 | 2454517 | C | −9.94 | 0.0121 |
| MCPH1 | 2573 | 3020264 | A | −9.65 | 0.0221 |
| DLC1 | 2576 | 569510 | A | 13.54 | 0.0026 |
| DLC1 | 2577 | 2203838 | C | 13.22 | 0.0042 |
| DLC1 | 2578 | 536147 | G | 11.16 | 0.0130 |
| SLC7A2 | 2601 | 7002951 | G | 15.96 | 0.0059 |
| PSD3 | 2606 | 11990818 | G | −8.48 | 0.0438 |
| UNC5D | 2644 | 3015796 | G | 9.15 | 0.0321 |
| LYN | 2676 | 17812677 | T | −12.56 | 0.0137 |
| LYN | 2677 | 16922508 | C | −12.56 | 0.0137 |
| LYN | 2679 | 6988853 | A | −11.16 | 0.0170 |
| LYN | 2681 | 2668003 | C | −9.98 | 0.0335 |
| NKAIN3 | 2694 | 896489 | G | −10.97 | 0.0132 |
| NKAIN3 | 2713 | 10504356 | G | −16.39 | 0.0144 |
| NKAIN3 | 2716 | 4739023 | C | 10.11 | 0.0115 |
| NKAIN3 | 2718 | 1350059 | C | 9.86 | 0.0148 |
| DEPDC2 | 2725 | 4737868 | A | 9.72 | 0.0154 |
| DEPDC2 | 2728 | 1434764 | A | −8.84 | 0.0352 |
| KCNB2 | 2739 | 349350 | G | −9.58 | 0.0359 |
| FER1L6 | 2839 | 10094533 | C | 14.91 | 0.0079 |
| FER1L6 | 2842 | 7832499 | C | 15.37 | 0.0093 |
| FER1L6 | 2843 | 9643188 | A | 15.84 | 0.0100 |
| FER1L6 | 2844 | 13254498 | A | 14.73 | 0.0143 |
| FER1L6 | 2846 | 13269044 | G | 14.53 | 0.0164 |
| MTSS1 | 2856 | 6470298 | A | 16.81 | 0.0413 |
| ADCY8 | 2897 | 17327900 | A | −13.26 | 0.0424 |
| ST3GAL1 | 2903 | 2978015 | T | 7.73 | 0.0476 |
| COL22A1 | 2909 | 7844188 | G | 9.41 | 0.0499 |
| SMARCA2 | 2927 | 10757205 | G | −18.00 | 0.0334 |
| SLC1A1 | 2937 | 159914 | C | 9.23 | 0.0417 |
| KIAA1797 | 2966 | 7025868 | G | −10.35 | 0.0382 |
| KIAA1797 | 2967 | 6475483 | T | −10.47 | 0.0443 |
| KIAA1797 | 2973 | 6475490 | G | 8.73 | 0.0267 |
| KIAA1797 | 2974 | 6475491 | G | 7.76 | 0.0481 |
| KIAA1797 | 2977 | 7025851 | G | 9.13 | 0.0222 |
| KIAA1797 | 2979 | 4977881 | A | −9.69 | 0.0307 |
| APBA1 | 3004 | 11139084 | A | 8.90 | 0.0254 |
| APBA1 | 3005 | 10867730 | T | 8.90 | 0.0254 |
| MAMDC2 | 3008 | 3015182 | C | 19.84 | 0.0102 |
| MAMDC2 | 3009 | 2975866 | A | 19.84 | 0.0102 |
| MAMDC2 | 3010 | 3015189 | G | 19.84 | 0.0102 |
| MAMDC2 | 3011 | 3015213 | A | 19.84 | 0.0102 |
| TMC1 | 3034 | 2487471 | T | 12.41 | 0.0181 |
| TMC1 | 3036 | 1663740 | T | 10.93 | 0.0398 |
| TMC1 | 3037 | 1796991 | G | 10.64 | 0.0419 |
| TMC1 | 3038 | 2589609 | T | 10.64 | 0.0419 |
| PCSK5 | 3052 | 2789608 | G | −13.11 | 0.0012 |
| ZNF169 | 3098 | 7037298 | T | −13.98 | 0.0138 |
| GABBR2 | 3105 | 16914811 | A | 16.40 | 0.0163 |
| GABBR2 | 3106 | 3780439 | G | 9.53 | 0.0342 |
| CDK5RAP2 | 3136 | 3780679 | G | 27.19 | 0.0129 |
| NTNG2 | 3176 | 3739930 | A | −14.54 | 0.0221 |
| NTNG2 | 3177 | 3739929 | G | −13.48 | 0.0315 |
| NPDC1 | 3202 | 4880195 | C | 9.93 | 0.0436 |
| PITRM1 | 3219 | 3814596 | G | 11.27 | 0.0236 |
| CACNB2 | 3240 | 10828726 | G | −9.12 | 0.0263 |
| JMJD1C | 3301 | 9629895 | A | 10.26 | 0.0222 |
| CDH23 | 3306 | 7896061 | C | −10.49 | 0.0479 |
| KCNMA1 | 3334 | 2619636 | A | 10.03 | 0.0109 |
| KCNMA1 | 3335 | 2719986 | T | 8.31 | 0.0369 |
| SORBS1 | 3368 | 564370 | A | 9.22 | 0.0329 |
| ATRNL1 | 3413 | 7922670 | C | −7.08 | 0.0482 |
| STIM1 | 3459 | 10835337 | T | 10.45 | 0.0270 |
| STIM1 | 3461 | 7924984 | A | 9.80 | 0.0372 |
| STIM1 | 3465 | 2959068 | T | 8.64 | 0.0443 |
| STIM1 | 3466 | 1372805 | A | 8.64 | 0.0443 |
| SPON1 | 3499 | 1528668 | C | −9.76 | 0.0341 |
| SPON1 | 3512 | 3935919 | C | −12.74 | 0.0051 |
| SPON1 | 3513 | 4757244 | A | −10.81 | 0.0129 |
| TMEM16B | 3606 | 11063913 | G | −10.79 | 0.0279 |
| TMEM16B | 3607 | 3741903 | G | −11.41 | 0.0369 |
| LOC729025 | 3628 | 11056858 | T | 14.05 | 0.0421 |
| LOC729025 | 3629 | 11056862 | A | 14.05 | 0.0421 |
| PIK3C2G | 3631 | 4764383 | G | −10.17 | 0.0186 |
| CNOT2 | 3648 | 10506586 | A | 15.30 | 0.0359 |
| CNOT2 | 3650 | 3817486 | G | 15.30 | 0.0359 |
| GAS2L3 | 3680 | 35711 | G | −8.17 | 0.0381 |
| GAS2L3 | 3681 | 35706 | A | −7.81 | 0.0441 |
| UBL3 | 3696 | 17502901 | G | 9.52 | 0.0364 |
| PCDH20 | 3737 | 17059750 | T | 25.34 | 0.0381 |
| LMO7 | 3745 | 7326714 | T | 8.95 | 0.0234 |
| LMO7 | 3748 | 2273996 | T | 10.31 | 0.0255 |
| LMO7 | 3750 | 920701 | C | 10.01 | 0.0159 |
| LMO7 | 3751 | 9530473 | G | 11.42 | 0.0048 |
| LMO7 | 3752 | 7986131 | T | 12.23 | 0.0072 |
| GPC5 | 3770 | 9652104 | A | 13.42 | 0.0357 |
| GPC6 | 3804 | 3848066 | C | −9.52 | 0.0232 |
| GPC6 | 3813 | 9524268 | T | −9.69 | 0.0373 |
| NALCN | 3836 | 9300662 | G | −9.36 | 0.0232 |
| NALCN | 3837 | 3916910 | C | 9.28 | 0.0411 |
| SLC25A21 | 3878 | 2073248 | C | 21.08 | 0.0004 |
| SLC25A21 | 3879 | 12185044 | G | 17.59 | 0.0033 |
| LRFN5 | 3894 | 862480 | T | 10.55 | 0.0117 |
| SAMD4A | 3911 | 1307289 | G | −10.32 | 0.0307 |
| SAMD4A | 3912 | 1212968 | C | −10.73 | 0.0405 |
| SAMD4A | 3917 | 2057369 | A | 15.81 | 0.0011 |
| SAMD4A | 3918 | 17128004 | A | 15.81 | 0.0011 |
| SAMD4A | 3919 | 10483639 | C | 14.84 | 0.0021 |
| PPP2R5E | 3923 | 4899113 | C | −10.38 | 0.0337 |
| RGS6 | 3953 | 917426 | G | −8.66 | 0.0294 |
| RPS6KA5 | 3976 | 1286148 | C | −10.74 | 0.0234 |
| ATP10A | 4011 | 2930630 | C | 15.19 | 0.0036 |
| ATP10A | 4014 | 4906750 | C | 10.98 | 0.0198 |
| C15ORF41 | 4045 | 16964103 | T | −17.91 | 0.0344 |
| C15ORF41 | 4047 | 17508461 | T | −17.91 | 0.0344 |
| MEIS2 | 4048 | 716218 | A | 8.24 | 0.0431 |
| TBC1D2B | 4094 | 12593545 | G | −11.85 | 0.0090 |
| ARNT2 | 4105 | 7180510 | G | 9.09 | 0.0407 |
| A2BP1 | 4113 | 17822719 | A | −11.25 | 0.0084 |
| GDE1 | 4143 | 3751821 | T | 13.88 | 0.0376 |
| MPHOSPH6 | 4164 | 8047857 | C | 11.70 | 0.0380 |
| CRISPLD2 | 4215 | 8049317 | G | 9.70 | 0.0146 |
| ALOX12B | 4218 | 9914077 | G | 11.27 | 0.0096 |
| CA10 | 4226 | 11867674 | G | −7.32 | 0.0384 |
| CA10 | 4227 | 8076197 | G | 7.32 | 0.0384 |
| CA10 | 4228 | 8076496 | G | 7.32 | 0.0384 |
| CA10 | 4230 | 4794295 | T | −7.32 | 0.0384 |
| DNAH17 | 4264 | 16971269 | C | 8.81 | 0.0441 |
| DNAH17 | 4270 | 9907431 | A | −8.20 | 0.0466 |
| LOXHD1 | 4318 | 11082530 | T | −8.69 | 0.0452 |
| CCBE1 | 4337 | 12969965 | A | −14.12 | 0.0041 |
| CCBE1 | 4343 | 1560299 | T | 10.34 | 0.0082 |
| CCBE1 | 4344 | 4608425 | A | 9.12 | 0.0207 |
| DOK6 | 4374 | 7243624 | T | 8.19 | 0.0338 |
| LDLR | 4384 | 2116897 | T | 14.54 | 0.0065 |
| PRNT | 4396 | 2236284 | G | −13.88 | 0.0016 |
| PRNT | 4405 | 968433 | C | −13.43 | 0.0019 |
| PRNT | 4406 | 6084875 | A | −10.99 | 0.0132 |
| PRNT | 4407 | 6084876 | T | −10.77 | 0.0144 |
| FERMT1 | 4411 | 8121939 | G | 10.70 | 0.0173 |
| MACROD2 | 4457 | 6043648 | C | −10.48 | 0.0059 |
| KIF16B | 4476 | 6034509 | G | 8.63 | 0.0294 |
| KIF16B | 4477 | 6135769 | A | 8.63 | 0.0294 |
| KIF16B | 4478 | 6044044 | A | 8.63 | 0.0294 |
| KIF16B | 4480 | 6135784 | G | 8.63 | 0.0294 |
| KIF16B | 4481 | 720592 | T | 8.63 | 0.0294 |
| MAPRE1 | 4491 | 2070090 | T | 14.58 | 0.0015 |
| PTPRT | 4503 | 6065484 | C | −9.71 | 0.0339 |
| PTPRT | 4504 | 230153 | T | −10.49 | 0.0439 |
| PTPRT | 4507 | 6065525 | A | −8.79 | 0.0444 |
| PTPRT | 4511 | 2223540 | T | −9.31 | 0.0483 |
| SNAI1 | 4528 | 6020187 | G | −9.54 | 0.0367 |
| PDE9A | 4562 | 2269145 | T | 10.22 | 0.0117 |
| PDE9A | 4564 | 12626774 | C | −8.69 | 0.0391 |
| PDE9A | 4565 | 2284976 | A | 10.74 | 0.0106 |
| ARVCF | 4570 | 887203 | A | 34.48 | 0.0147 |
| PACSIN2 | 4590 | 2072883 | G | 10.39 | 0.0126 |
| TTLL1 | 4592 | 1052160 | T | −10.20 | 0.0133 |

TABLE 3
Alleles Influencing Response to Quetiapine

| Gene | Seq ID | NCBI RS# | Allele | Beta (PANSS) | P |
|---|---|---|---|---|---|
| SCP2 | 39 | 7528867 | A | 28.75 | 0.00361 |
| SCP2 | 40 | 11206061 | C | 28.75 | 0.00361 |
| SCP2 | 41 | 7546714 | T | 14.16 | 0.03148 |
| SCP2 | 42 | 6588458 | A | 14.87 | 0.03712 |
| SCP2 | 44 | 11588200 | T | 20.34 | 0.01544 |
| SCP2 | 45 | 2896792 | T | 19.99 | 0.01707 |
| SCP2 | 46 | 17107767 | C | 19.99 | 0.01707 |
| SCP2 | 47 | 12096165 | G | 19.99 | 0.01707 |
| LRP8 | 50 | 869987 | T | −9.58 | 0.03659 |
| LRP8 | 51 | 869988 | C | −9.58 | 0.03659 |
| PRKACB | 68 | 3915908 | T | −10.70 | 0.04731 |
| PRKACB | 69 | 3903924 | G | 10.57 | 0.04814 |
| PRKACB | 74 | 2642186 | G | 10.31 | 0.03302 |
| OLFML2B | 110 | 7537366 | T | 14.04 | 0.01786 |
| ESRRG | 183 | 12033378 | A | 12.78 | 0.03923 |
| RYR2 | 215 | 4659819 | T | −13.39 | 0.00224 |
| FMN2 | 251 | 882869 | G | −10.78 | 0.04162 |
| KLHL29 | 299 | 9261 | T | 12.04 | 0.01064 |
| KLHL29 | 300 | 12478701 | C | 11.64 | 0.01200 |
| KLHL29 | 301 | 12478744 | A | −10.03 | 0.03478 |
| DPYSL5 | 311 | 12618836 | A | −14.78 | 0.00154 |
| DPYSL5 | 312 | 3769138 | G | −8.96 | 0.04317 |
| CRIM1 | 327 | 4670549 | T | −9.16 | 0.04585 |
| CDC42EP3 | 340 | 4670745 | G | −10.78 | 0.03597 |
| CDC42EP3 | 341 | 10694 | T | −13.56 | 0.02699 |
| SLC8A1 | 345 | 417614 | A | −10.33 | 0.02748 |
| SLC8A1 | 347 | 11885401 | C | −13.70 | 0.03826 |
| C2ORF34 | 363 | 1584885 | C | −8.90 | 0.04586 |
| PRKCE | 382 | 4953288 | T | −10.21 | 0.02069 |
| ACYP2 | 415 | 6744662 | T | 16.39 | 0.00683 |
| ACYP2 | 416 | 10439478 | C | 13.05 | 0.01119 |
| CCDC85A | 422 | 8179803 | T | −12.78 | 0.00709 |
| CCDC85A | 425 | 2111470 | C | −13.67 | 0.01014 |
| CCDC85A | 426 | 1990758 | C | −20.48 | 0.00591 |
| CCDC85A | 427 | 10460558 | A | −13.67 | 0.01014 |
| OTX1 | 431 | 11125946 | A | 14.15 | 0.00223 |
| LRP1B | 516 | 10178963 | A | 9.55 | 0.03033 |
| KYNU | 530 | 7561260 | G | −12.92 | 0.04210 |
| KYNU | 532 | 1371516 | C | −15.60 | 0.00474 |
| KYNU | 533 | 6430001 | A | −15.14 | 0.00433 |
| KYNU | 534 | 3768844 | C | −16.13 | 0.01182 |
| FMNL2 | 583 | 16823809 | C | −13.92 | 0.04578 |
| PLA2R1 | 603 | 6432570 | T | 10.93 | 0.02808 |
| PLA2R1 | 612 | 2175416 | T | −10.05 | 0.02269 |
| PLA2R1 | 614 | 16844715 | T | −10.05 | 0.02269 |
| CERKL | 634 | 1967351 | C | 9.94 | 0.04738 |
| NRP2 | 668 | 849540 | T | 9.96 | 0.04191 |
| COL4A4 | 694 | 2276593 | A | 15.58 | 0.00053 |
| COL4A4 | 695 | 10166736 | A | 14.86 | 0.00088 |
| COL4A4 | 697 | 4566357 | A | −10.71 | 0.02458 |
| DNER | 712 | 207671 | G | 11.26 | 0.01097 |
| DNER | 713 | 6733289 | G | 12.62 | 0.01409 |
| TRIP12 | 724 | 6707272 | T | 10.22 | 0.04130 |
| TRIP12 | 725 | 6687 | T | −15.08 | 0.02818 |
| TRIP12 | 726 | 1372086 | C | −12.27 | 0.04566 |
| CNTN6 | 750 | 155390 | G | 13.19 | 0.00341 |
| CNTN6 | 751 | 2291100 | C | 11.89 | 0.01478 |
| CNTN6 | 752 | 3915436 | A | −11.03 | 0.00983 |
| CNTN4 | 762 | 1502582 | T | 12.72 | 0.04388 |
| SLC6A6 | 795 | 4684216 | G | −25.78 | 0.00067 |
| ULK4 | 838 | 7627972 | A | −8.82 | 0.03737 |
| ULK4 | 840 | 6794510 | T | −8.52 | 0.04954 |
| ULK4 | 842 | 11129908 | A | −9.91 | 0.02216 |
| CACNA2D3 | 871 | 2141034 | A | −14.13 | 0.02467 |
| CACNA2D3 | 872 | 6804643 | A | −12.38 | 0.04995 |
| FLNB | 912 | 7632986 | T | −9.96 | 0.04182 |
| FLNB | 913 | 7622687 | A | −13.23 | 0.00550 |
| PTPRG | 940 | 9813294 | A | 10.41 | 0.01004 |
| CADPS | 942 | 1376917 | C | −21.12 | 0.03049 |
| FAM19A1 | 982 | 6801913 | A | 10.15 | 0.03078 |
| FOXP1 | 985 | 2597312 | C | 9.79 | 0.03127 |
| FOXP1 | 987 | 1290499 | T | −16.99 | 0.01410 |
| STX19 | 1000 | 9810986 | T | 29.68 | 0.00262 |
| STXBP5L | 1036 | 2169302 | G | 14.91 | 0.04740 |
| RAB6B | 1061 | 6765093 | G | 10.16 | 0.03627 |
| EPHB1 | 1064 | 4955460 | C | −11.99 | 0.01041 |
| EPHB1 | 1065 | 185257 | T | −10.65 | 0.03061 |
| EPHB1 | 1066 | 9825380 | T | −10.80 | 0.03441 |
| EPHB1 | 1067 | 936323 | T | −10.08 | 0.04468 |
| EPHB1 | 1068 | 1870196 | T | −12.03 | 0.01370 |
| TNIK | 1097 | 6781167 | A | 26.27 | 0.00163 |
| TNIK | 1098 | 12486611 | T | 25.75 | 0.00178 |
| PLD1 | 1106 | 1316415 | G | −10.17 | 0.02517 |
| PLD1 | 1107 | 7626674 | C | 13.50 | 0.02594 |
| PLD1 | 1109 | 2178532 | A | 13.50 | 0.02594 |
| PCDH7 | 1199 | 10517215 | A | 12.34 | 0.04410 |
| PCDH7 | 1202 | 2310225 | A | 12.78 | 0.01941 |
| LIMCH1 | 1223 | 6821712 | C | −9.50 | 0.04144 |
| NPFFR2 | 1249 | 17775309 | G | 9.68 | 0.04822 |
| SHROOM3 | 1259 | 10022778 | G | 8.13 | 0.04828 |
| SCD5 | 1263 | 17006038 | C | 13.50 | 0.03407 |
| SCD5 | 1271 | 3897960 | A | −12.82 | 0.03552 |
| HERC3 | 1275 | 3796660 | A | −19.26 | 0.03462 |
| FAM13A1 | 1283 | 6814344 | G | −10.80 | 0.04153 |
| FAM13A1 | 1284 | 13131633 | T | −10.80 | 0.04153 |
| PAPSS1 | 1307 | 2672487 | A | −9.55 | 0.04604 |
| COL25A1 | 1315 | 17039326 | T | 13.56 | 0.01265 |
| COL25A1 | 1316 | 9996734 | A | 12.84 | 0.01446 |
| COL25A1 | 1334 | 987695 | G | 10.43 | 0.02112 |
| COL25A1 | 1335 | 7675657 | A | 9.44 | 0.04234 |
| ANK2 | 1350 | 29355 | G | −12.76 | 0.03517 |
| ANK2 | 1352 | 29319 | A | −12.67 | 0.03804 |
| CAMK2D | 1359 | 17046126 | T | 9.37 | 0.04666 |
| CAMK2D | 1361 | 1859148 | C | −11.78 | 0.02900 |
| CAMK2D | 1362 | 7675804 | T | −11.78 | 0.02900 |
| CAMK2D | 1363 | 10023113 | G | 19.04 | 0.01080 |
| MAML3 | 1392 | 10024138 | T | −9.54 | 0.04145 |
| POU4F2 | 1425 | 7680105 | G | −18.46 | 0.00196 |
| POU4F2 | 1428 | 6835151 | A | −17.97 | 0.00525 |
| POU4F2 | 1429 | 1394279 | G | −18.05 | 0.00551 |
| FSTL5 | 1452 | 4501178 | C | 13.98 | 0.03848 |
| FSTL5 | 1473 | 4691039 | T | 18.45 | 0.00375 |
| CASP3 | 1529 | 2696056 | G | −12.54 | 0.04554 |
| AHRR | 1531 | 2721004 | T | −9.04 | 0.04234 |
| AHRR | 1532 | 2721012 | G | −10.04 | 0.03557 |
| SLC1A3 | 1583 | 3776569 | G | −9.41 | 0.04957 |
| EGFLAM | 1596 | 2731979 | C | 14.60 | 0.03298 |
| ITGA1 | 1607 | 2169782 | T | 20.56 | 0.00163 |
| VCAN | 1668 | 2287926 | A | 15.56 | 0.01299 |
| VCAN | 1671 | 2445874 | T | 12.62 | 0.04828 |
| PJA2 | 1723 | 2963034 | A | 10.47 | 0.01709 |
| KCNN2 | 1726 | 1072922 | A | 11.72 | 0.02454 |
| KCNN2 | 1728 | 13163662 | A | 12.26 | 0.01715 |
| ADAMTS19 | 1769 | 4835975 | A | 11.67 | 0.01495 |
| ODZ2 | 1793 | 1529682 | G | −13.20 | 0.04506 |
| SLC22A23 | 1807 | 3813487 | A | 14.38 | 0.01646 |
| BRD2 | 1879 | 194677 | T | −26.51 | 0.01459 |
| ELOVL5 | 1888 | 2562898 | A | 12.58 | 0.02447 |
| RIMS1 | 1902 | 1010326 | A | −13.37 | 0.00906 |
| RIMS1 | 1905 | 2496495 | G | −8.96 | 0.04892 |
| RIMS1 | 1906 | 2250128 | C | −9.54 | 0.03816 |
| RIMS1 | 1908 | 9351903 | G | 10.79 | 0.01570 |
| RIMS1 | 1910 | 10498882 | G | 10.13 | 0.02668 |
| RIMS1 | 1911 | 2807531 | A | 9.63 | 0.04062 |
| STX11 | 1996 | 4896708 | A | −10.18 | 0.02725 |
| PDE10A | 2063 | 484594 | C | −13.01 | 0.03420 |
| SDK1 | 2070 | 10265630 | G | 10.87 | 0.03561 |
| SDK1 | 2071 | 1062213 | C | 10.61 | 0.04465 |
| SNX13 | 2101 | 10216315 | C | 9.58 | 0.03782 |
| STK31 | 2112 | 6957981 | G | 13.72 | 0.01342 |
| CREB5 | 2119 | 2237361 | C | 9.31 | 0.04837 |
| CREB5 | 2124 | 17669844 | C | 10.09 | 0.04720 |
| SCRN1 | 2129 | 9912 | T | −11.55 | 0.02516 |
| PDE1C | 2155 | 6952633 | G | −10.82 | 0.03590 |
| PDE1C | 2160 | 4551232 | A | −9.19 | 0.04338 |
| PDE1C | 2161 | 10225488 | A | −9.19 | 0.04338 |
| BMPER | 2163 | 11978741 | T | 10.68 | 0.04675 |
| ABCA13 | 2194 | 17132289 | T | 24.20 | 0.00500 |
| GRB10 | 2216 | 3779072 | G | 13.39 | 0.03125 |
| GRB10 | 2219 | 1978208 | G | 13.13 | 0.03586 |
| GRB10 | 2224 | 12536500 | T | 12.05 | 0.04430 |
| WBSCR17 | 2242 | 4585627 | T | 10.71 | 0.02053 |
| GTF2IRD1 | 2252 | 2267834 | G | −15.82 | 0.00219 |
| MAGI2 | 2278 | 1918930 | C | −19.68 | 0.00211 |
| MAGI2 | 2279 | 848913 | C | −17.50 | 0.01199 |
| MAGI2 | 2282 | 10259665 | A | 14.84 | 0.00299 |
| MAGI2 | 2285 | 2191806 | C | 14.60 | 0.04286 |
| MAGI2 | 2288 | 6466535 | C | 16.79 | 0.02393 |
| MAGI2 | 2293 | 848934 | C | −19.68 | 0.00211 |
| MAGI2 | 2301 | 4730829 | C | 12.19 | 0.02884 |
| CACNA2D1 | 2304 | 17262683 | C | −10.61 | 0.04476 |
| CACNA2D1 | 2305 | 10215394 | G | −10.68 | 0.02153 |
| CACNA2D1 | 2317 | 6952949 | G | −939 | 0.04936 |
| SEMA3E | 2339 | 2713174 | C | 9.61 | 0.04165 |
| SEMA3A | 2347 | 1989964 | T | 8.01 | 0.04934 |
| ABCB4 | 2352 | 31669 | A | −25.48 | 0.00291 |
| PPP1R9A | 2365 | 6465455 | T | −12.31 | 0.00459 |
| PPP1R9A | 2367 | 854738 | T | −14.64 | 0.00212 |
| PPP1R9A | 2369 | 961262 | C | −12.06 | 0.00394 |
| PON1 | 2381 | 3917538 | T | 13.46 | 0.02265 |
| PON1 | 2382 | 2057681 | G | 11.09 | 0.03250 |
| PON1 | 2383 | 2299257 | C | 17.35 | 0.00010 |
| EXOC4 | 2463 | 2345943 | T | 9.28 | 0.04423 |
| EXOC4 | 2464 | 7776986 | C | −8.93 | 0.04321 |
| EXOC4 | 2465 | 10808271 | C | −8.93 | 0.04321 |
| PTPRN2 | 2535 | 2878355 | A | −11.30 | 0.04363 |
| CSMD1 | 2544 | 7829968 | T | 14.04 | 0.01998 |
| CSMD1 | 2548 | 1161518 | T | 11.24 | 0.03612 |
| MCPH1 | 2571 | 1057090 | T | −11.34 | 0.01720 |
| MCPH1 | 2572 | 2911968 | C | −13.11 | 0.00694 |
| SGCZ | 2594 | 4831307 | G | 10.73 | 0.03295 |
| XPO7 | 2620 | 10101881 | T | 11.83 | 0.00703 |
| XPO7 | 2622 | 2306645 | T | 11.83 | 0.00703 |
| XPO7 | 2624 | 7013323 | C | 10.33 | 0.01964 |
| SFRP1 | 2648 | 7833518 | T | 11.63 | 0.01928 |
| SNTG1 | 2651 | 318861 | G | 33.83 | 0.00334 |
| SNTG1 | 2652 | 10504093 | G | 26.47 | 0.01475 |
| SNTG1 | 2657 | 9298278 | A | 9.08 | 0.03616 |
| SNTG1 | 2659 | 4873135 | A | 8.75 | 0.04379 |
| LYN | 2673 | 1546518 | C | 10.00 | 0.02711 |
| TOX | 2685 | 11777927 | A | −13.16 | 0.02972 |
| CRISPLD1 | 2758 | 13248650 | G | 14.91 | 0.00199 |
| MMP16 | 2761 | 2616499 | G | 11.95 | 0.02270 |
| ZFPM2 | 2806 | 7007352 | G | 24.36 | 0.00854 |
| ZFPM2 | 2808 | 1372614 | G | 24.36 | 0.00854 |
| SAMD12 | 2818 | 4876815 | G | −12.26 | 0.01965 |
| FBXO32 | 2830 | 6990407 | G | 16.67 | 0.00922 |
| FER1L6 | 2832 | 13279726 | G | −9.02 | 0.04900 |
| COL22A1 | 2913 | 6991720 | C | −12.69 | 0.02068 |
| COL22A1 | 2914 | 13279213 | A | −13.13 | 0.01377 |
| COL22A1 | 2915 | 1879047 | T | 15.41 | 0.03227 |
| COL22A1 | 2916 | 2318348 | G | 13.41 | 0.04622 |
| SMARCA2 | 2923 | 13301640 | A | −17.56 | 0.01897 |
| KIAA1797 | 2968 | 10738569 | A | −11.42 | 0.04514 |
| TEK | 2987 | 4601425 | T | −11.59 | 0.02295 |
| TEK | 2989 | 10511803 | C | −13.99 | 0.03164 |
| PIP5K1B | 2992 | 4744683 | T | 15.46 | 0.00132 |
| PIP5K1B | 2993 | 4534183 | A | −15.26 | 0.00152 |
| PIP5K1B | 2994 | 7853748 | G | 12.87 | 0.00748 |
| TRPM3 | 3026 | 1329776 | G | −14.14 | 0.01573 |
| NFIL3 | 3089 | 2440589 | T | 8.33 | 0.04871 |
| GABBR2 | 3105 | 16914811 | A | 14.03 | 0.03112 |
| SVEP1 | 3126 | 10759422 | C | 12.55 | 0.01872 |
| RALGPS1 | 3160 | 10987576 | A | −13.98 | 0.04220 |
| KCNT1 | 3195 | 497547 | G | 32.82 | 0.00928 |
| PITRM1 | 3225 | 6601755 | C | −9.59 | 0.04178 |
| CACNB2 | 3233 | 7090118 | A | −9.09 | 0.04983 |
| ARMC3 | 3245 | 10828374 | G | −15.07 | 0.00074 |
| ARMC3 | 3246 | 7919349 | G | −12.60 | 0.03190 |
| ARMC3 | 3248 | 17440393 | A | −13.21 | 0.02520 |
| ARMC3 | 3249 | 11013210 | T | −13.29 | 0.02262 |
| ARMC3 | 3251 | 10828395 | A | −14.16 | 0.03000 |
| JMJD1C | 3303 | 2893922 | C | 12.36 | 0.03509 |
| KCNMA1 | 3330 | 10509386 | C | 11.01 | 0.02073 |
| KCNMA1 | 3331 | 11002120 | T | 11.01 | 0.02073 |
| KCNMA1 | 3334 | 2619636 | A | −12.24 | 0.00287 |
| KCNMA1 | 3335 | 2719986 | T | −11.93 | 0.00328 |
| KCNMA1 | 3336 | 12780841 | A | −16.00 | 0.02220 |
| KCNMA1 | 3337 | 1465865 | C | −16.00 | 0.02220 |
| KCNMA1 | 3338 | 1978868 | A | −11.20 | 0.03732 |
| NRG3 | 3348 | 7078771 | A | −30.75 | 0.02918 |
| NRG3 | 3349 | 17107795 | T | −30.75 | 0.02918 |
| NRG3 | 3351 | 17101125 | A | −30.75 | 0.02918 |
| NRG3 | 3352 | 10509462 | T | −30.75 | 0.02918 |
| SORBS1 | 3358 | 11188287 | G | 14.94 | 0.00368 |
| SORCS3 | 3373 | 7900775 | T | 9.46 | 0.03682 |
| SORCS3 | 3375 | 7912102 | A | −12.13 | 0.01927 |
| SORCS3 | 3376 | 6584631 | T | −11.62 | 0.02475 |
| SORCS3 | 3380 | 7085496 | A | −10.57 | 0.04469 |
| SORCS3 | 3381 | 4918143 | T | 12.80 | 0.04764 |
| ATE1 | 3438 | 10510104 | G | −15.97 | 0.01579 |
| ATE1 | 3440 | 11598265 | C | −47.04 | 0.01634 |
| ATE1 | 3441 | 10788208 | A | −47.04 | 0.01634 |
| ATE1 | 3443 | 4471357 | A | −47.04 | 0.01634 |
| ATE1 | 3444 | 10749429 | T | −46.22 | 0.01723 |
| CTBP2 | 3454 | 769160 | C | 17.95 | 0.00445 |
| CTBP2 | 3455 | 9422765 | G | 14.93 | 0.00756 |
| GALNTL4 | 3471 | 7122801 | T | 14.69 | 0.00173 |
| NELL1 | 3516 | 12799803 | A | −13.94 | 0.03618 |
| DLG2 | 3538 | 4944461 | A | 18.63 | 0.04652 |
| DLG2 | 3552 | 1940128 | C | 15.62 | 0.02873 |
| DLG2 | 3554 | 582652 | A | 20.77 | 0.00323 |
| DLG2 | 3555 | 483220 | G | 14.75 | 0.03123 |
| OPCML | 3560 | 10894536 | A | −16.26 | 0.02002 |
| OPCML | 3567 | 7119286 | C | −14.35 | 0.00460 |
| OPCML | 3568 | 3018406 | A | −10.99 | 0.01738 |
| OPCML | 3571 | 3016500 | T | −10.21 | 0.04733 |
| OPCML | 3572 | 6590684 | G | −8.83 | 0.04804 |
| OPCML | 3585 | 7936263 | G | 14.05 | 0.00248 |
| OPCML | 3587 | 7108670 | C | 13.33 | 0.00699 |
| OPCML | 3588 | 7108751 | T | 12.85 | 0.00999 |
| LOC729025 | 3617 | 7955194 | T | −10.71 | 0.01769 |
| LOC729025 | 3620 | 6488827 | T | 9.52 | 0.02910 |
| LOC729025 | 3622 | 10772915 | A | −10.51 | 0.02419 |
| LOC729025 | 3623 | 1913253 | T | 9.48 | 0.03730 |
| LOC729025 | 3627 | 10734895 | A | 16.50 | 0.00600 |
| ITPR2 | 3640 | 2230375 | G | −15.33 | 0.00116 |
| NAV3 | 3667 | 7976374 | A | 10.13 | 0.03246 |
| NAV3 | 3674 | 1731757 | C | −23.93 | 0.02158 |
| ATXN2 | 3686 | 1544396 | G | −10.58 | 0.04357 |
| MTIF3 | 3690 | 17085657 | C | −34.65 | 0.00588 |
| MTIF3 | 3692 | 7334690 | A | −12.77 | 0.02160 |
| PCDH20 | 3737 | 17059750 | T | −55.74 | 0.00040 |
| PCDH20 | 3739 | 3812874 | T | −55.74 | 0.00040 |
| ITGBL1 | 3843 | 7323330 | A | 9.34 | 0.02946 |
| ITGBL1 | 3844 | 4772403 | T | 10.87 | 0.01544 |
| ITGBL1 | 3851 | 1469855 | G | −18.66 | 0.03401 |
| NPAS3 | 3865 | 1290203 | T | −10.28 | 0.02936 |
| NPAS3 | 3867 | 243284 | G | −9.91 | 0.03912 |
| SLC25A21 | 3880 | 10138134 | A | −21.38 | 0.03937 |
| LRFN5 | 3893 | 12884090 | A | −10.48 | 0.04179 |
| PPP2R5E | 3929 | 7154718 | G | −36.65 | 0.01356 |
| KCNK10 | 3966 | 12185033 | T | 11.24 | 0.02219 |
| KCNK13 | 3969 | 769044 | A | −9.72 | 0.03184 |
| ATP10A | 4005 | 11853308 | C | −9.26 | 0.03688 |
| ATP10A | 4009 | 12442216 | T | −9.93 | 0.04477 |
| ATP10A | 4012 | 4906747 | G | 17.70 | 0.04997 |
| ATP10A | 4013 | 10873606 | A | −12.27 | 0.00657 |
| ATP10A | 4014 | 4906750 | C | 12.86 | 0.03028 |
| RYR3 | 4021 | 1980102 | A | 9.38 | 0.03360 |
| C15ORF41 | 4038 | 3784678 | C | 9.30 | 0.03009 |
| CGNL1 | 4067 | 12595188 | G | 13.54 | 0.01546 |
| CGNL1 | 4068 | 4774257 | G | 11.11 | 0.02124 |
| CGNL1 | 4072 | 8034215 | G | −12.17 | 0.00844 |
| RORA | 4078 | 12914584 | G | 9.52 | 0.04840 |
| KIFC3 | 4149 | 874503 | A | −29.26 | 0.03832 |
| WWOX | 4151 | 8061908 | C | 13.29 | 0.00239 |
| WWOX | 4152 | 1922620 | C | 12.60 | 0.00368 |
| WWOX | 4154 | 16947095 | A | −10.87 | 0.00821 |
| WWOX | 4155 | 7184271 | C | −9.30 | 0.03705 |
| WWOX | 4156 | 4887935 | C | 12.10 | 0.00692 |
| MPHOSPH6 | 4165 | 2081257 | G | −21.33 | 0.00325 |
| MPHOSPH6 | 4167 | 7192444 | G | 10.16 | 0.03567 |
| MPHOSPH6 | 4168 | 11645604 | A | −18.83 | 0.00409 |
| MPHOSPH6 | 4169 | 11647563 | C | −18.06 | 0.01012 |
| MPHOSPH6 | 4171 | 10514533 | C | −14.84 | 0.03018 |
| USP10 | 4211 | 8060725 | A | −9.05 | 0.04662 |
| DNAH9 | 4222 | 11078034 | C | −10.61 | 0.02917 |
| DNAH9 | 4223 | 9903258 | G | −15.15 | 0.00214 |
| MSI2 | 4260 | 8065120 | A | 15.62 | 0.01491 |
| PTPRM | 4293 | 1866854 | G | 10.26 | 0.03005 |
| LOXHD1 | 4319 | 986117 | C | 11.42 | 0.01869 |
| NEDD4L | 4326 | 9962106 | T | 13.10 | 0.01472 |
| NEDD4L | 4329 | 10513914 | G | 12.79 | 0.01662 |
| NEDD4L | 4330 | 2075405 | G | 13.40 | 0.01607 |
| CCBE1 | 4342 | 2564495 | G | 10.79 | 0.02069 |
| CDH7 | 4363 | 9953248 | T | −28.26 | 0.04726 |
| TXNDC10 | 4373 | 309242 | G | −16.46 | 0.00943 |
| DOK6 | 4374 | 7243624 | T | 11.80 | 0.01762 |
| ZNF667 | 4387 | 10423617 | T | 13.70 | 0.01557 |
| MACROD2 | 4450 | 708975 | G | 8.64 | 0.02963 |
| MAPRE1 | 4490 | 410488 | A | 10.74 | 0.02545 |
| PTPRT | 4498 | 746413 | C | −9.32 | 0.02404 |
| PTPRT | 4502 | 6124439 | A | 15.34 | 0.00336 |
| SNAI1 | 4524 | 6020157 | A | 21.42 | 0.00127 |
| CDH4 | 4531 | 6121764 | G | −12.08 | 0.01213 |
| CDH4 | 4532 | 1317385 | C | −11.06 | 0.02082 |
| CDH4 | 4536 | 17811544 | G | 8.81 | 0.04843 |
| MIRN155 | 4555 | 8134718 | T | 12.63 | 0.04551 |
| SGSM1 | 4571 | 5760752 | C | −17.90 | 0.00009 |
| TTLL1 | 4592 | 1052160 | T | 9.39 | 0.02651 |
| EFCAB6 | 4596 | 7286735 | T | 13.61 | 0.01095 |
| EFCAB6 | 4599 | 12628583 | C | −20.37 | 0.01186 |
| EFCAB6 | 4612 | 2187887 | G | 11.66 | 0.01390 |
| EFCAB6 | 4615 | 138102 | T | 9.60 | 0.04333 |

TABLE 4
Alleles Influencing Response to Perphenazine

| Gene | Seq ID | NCBI RS# | Allele | Beta (PANSS) | P |
|---|---|---|---|---|---|
| EPHB2 | 20 | 10799762 | C | −18.09 | 0.00658 |
| EPHB2 | 23 | 309499 | T | 10.52 | 0.01061 |
| LRP8 | 48 | 5174 | A | 13.42 | 0.00025 |
| LRP8 | 52 | 2297660 | A | 12.62 | 0.00101 |
| LRP8 | 53 | 2297657 | A | 8.84 | 0.02742 |
| RALGPS2 | 132 | 6662050 | A | 25.81 | 0.00196 |
| RALGPS2 | 133 | 3766637 | C | 21.70 | 0.00747 |
| SLC35F3 | 186 | 7515801 | G | 18.89 | 0.00369 |
| SLC35F3 | 187 | 479040 | T | 18.67 | 0.00518 |
| SLC35F3 | 190 | 12118979 | C | −22.78 | 0.00162 |
| SLC35F3 | 191 | 10495346 | T | −23.53 | 0.00174 |
| FMN2 | 230 | 6698474 | A | 10.10 | 0.02189 |
| FMN2 | 231 | 12123407 | A | 10.06 | 0.02354 |
| FMN2 | 235 | 10926168 | G | −8.03 | 0.04313 |
| FMN2 | 236 | 7520065 | G | −8.03 | 0.04313 |
| RGS7 | 253 | 6429223 | G | 8.63 | 0.03151 |
| PLD5 | 271 | 1548160 | C | −10.35 | 0.01789 |
| C2ORF46 | 275 | 6747626 | C | −25.38 | 0.00733 |
| KLHL29 | 295 | 4665612 | T | 18.32 | 0.02099 |
| ASXL2 | 302 | 10180842 | G | 11.21 | 0.04149 |
| BRE | 317 | 1948922 | G | −10.64 | 0.02541 |
| SLC8A1 | 349 | 385561 | G | −10.88 | 0.03408 |
| PLEKHH2 | 362 | 10165660 | C | 11.78 | 0.02521 |
| C2ORF34 | 374 | 3738980 | C | −13.72 | 0.02998 |
| CTNNA2 | 448 | 3755095 | G | 13.53 | 0.02058 |
| CTNNA2 | 449 | 2974169 | C | −8.15 | 0.03658 |
| CTNNA2 | 455 | 1443895 | A | −7.70 | 0.04037 |
| LRP1B | 501 | 1486963 | C | −10.66 | 0.02393 |
| LRP1B | 503 | 1492388 | T | −9.32 | 0.01963 |
| LRP1B | 504 | 10469593 | C | −9.79 | 0.02421 |
| LRP1B | 505 | 12479163 | A | −9.98 | 0.02848 |
| LRP1B | 513 | 9283437 | C | −8.88 | 0.04509 |
| LRP1B | 515 | 4611596 | C | 8.49 | 0.04455 |
| LRP1B | 518 | 13418027 | C | −7.67 | 0.03880 |
| LRP1B | 521 | 4662370 | T | −10.09 | 0.04936 |
| LRP1B | 524 | 13382235 | G | −17.23 | 0.04795 |
| KYNU | 526 | 2043944 | T | −9.30 | 0.03330 |
| ARHGAP15 | 551 | 11694505 | C | 11.08 | 0.01213 |
| ARHGAP15 | 552 | 6745691 | G | 9.77 | 0.03162 |
| ARHGAP15 | 553 | 6750323 | C | 9.09 | 0.04200 |
| KCNJ3 | 593 | 2971904 | T | 17.32 | 0.00371 |
| PDE1A | 637 | 4666828 | A | 17.89 | 0.00084 |
| NRP2 | 670 | 849526 | A | 10.56 | 0.01259 |
| NRP2 | 671 | 849525 | A | 10.56 | 0.01259 |
| COL4A3 | 708 | 7587228 | C | 13.78 | 0.04754 |
| DNER | 716 | 2052303 | T | −8.93 | 0.03447 |
| TRIP12 | 727 | 475525 | T | 14.81 | 0.00593 |
| CLASP2 | 813 | 4679039 | C | 9.32 | 0.03495 |
| ULK4 | 838 | 7627972 | A | 9.28 | 0.03329 |
| ULK4 | 839 | 7649806 | A | 11.03 | 0.01291 |
| SEMA3F | 860 | 2624837 | T | 14.68 | 0.03126 |
| CACNA2D2 | 861 | 2298955 | C | 15.46 | 0.00237 |
| CACNA2D2 | 863 | 754298 | C | 15.81 | 0.00344 |
| IL17RD | 906 | 6788981 | T | 12.41 | 0.04164 |
| PTPRG | 933 | 1320173 | G | −9.36 | 0.02371 |
| MAGI1 | 976 | 264705 | A | 10.96 | 0.03322 |
| PLCXD2 | 1017 | 1913495 | T | −10.27 | 0.04585 |
| RAB6B | 1061 | 6765093 | G | −10.03 | 0.01598 |
| SPSB4 | 1084 | 4683550 | C | 11.95 | 0.03625 |
| NLGN1 | 1121 | 692457 | A | −8.44 | 0.04605 |
| NLGN1 | 1124 | 12634066 | A | −17.68 | 0.02450 |
| NLGN1 | 1126 | 1546685 | T | −9.77 | 0.04822 |
| NLGN1 | 1127 | 9828801 | T | −17.25 | 0.03279 |
| IL1RAP | 1143 | 2193877 | G | 9.10 | 0.04257 |
| SLC2A9 | 1159 | 3733591 | A | 10.07 | 0.04856 |
| NPFFR2 | 1250 | 2137735 | A | 11.74 | 0.01270 |
| NPFFR2 | 1252 | 2365797 | T | 9.08 | 0.04986 |
| SCD5 | 1266 | 7682126 | G | 9.52 | 0.03709 |
| SCD5 | 1267 | 13106297 | G | 9.52 | 0.03709 |
| COL25A1 | 1328 | 711865 | A | 8.61 | 0.03855 |
| ANK2 | 1340 | 13134375 | C | 10.05 | 0.00796 |
| ANK2 | 1341 | 13107082 | G | −8.30 | 0.02672 |
| ANK2 | 1342 | 413019 | C | −7.48 | 0.04296 |
| CAMK2D | 1364 | 6853484 | T | 22.47 | 0.03898 |
| PRSS12 | 1377 | 883686 | C | −8.78 | 0.04436 |
| MAML3 | 1386 | 6819304 | A | −14.75 | 0.01125 |
| MAML3 | 1392 | 10024138 | T | 9.42 | 0.02936 |
| IL15 | 1403 | 6841939 | A | 9.02 | 0.03908 |
| IL15 | 1406 | 4254850 | C | −7.95 | 0.04822 |
| IL15 | 1407 | 1493015 | A | 8.06 | 0.04924 |
| IL15 | 1408 | 6821171 | G | −10.89 | 0.01052 |
| IL15 | 1409 | 1389098 | C | −10.56 | 0.01099 |
| INPP4B | 1411 | 2667108 | C | 42.73 | 0.01254 |
| INPP4B | 1414 | 336329 | G | 42.73 | 0.01254 |
| INPP4B | 1415 | 336330 | T | 59.30 | 0.01366 |
| DCLK2 | 1441 | 12513356 | G | −20.95 | 0.02896 |
| DCLK2 | 1442 | 6535725 | A | −11.73 | 0.00199 |
| DCLK2 | 1443 | 4696645 | A | −16.65 | 0.00794 |
| ODZ3 | 1515 | 6820811 | G | 9.79 | 0.03884 |
| DNAH5 | 1554 | 1502050 | G | 14.21 | 0.00425 |
| DNAH5 | 1556 | 7709692 | C | 12.80 | 0.01798 |
| CDH10 | 1577 | 1835231 | A | −11.12 | 0.03042 |
| PDE4D | 1625 | 929820 | T | −10.43 | 0.01773 |
| PDE4D | 1626 | 2910642 | C | −8.65 | 0.03770 |
| CMYA5 | 1651 | 6880680 | C | 18.93 | 0.04811 |
| THBS4 | 1659 | 1866389 | C | 12.59 | 0.00821 |
| VCAN | 1666 | 11749904 | C | 8.13 | 0.04789 |
| FBXL17 | 1697 | 12519388 | T | 12.44 | 0.02375 |
| FBXL17 | 1698 | 12189428 | G | 12.44 | 0.02375 |
| FBXL17 | 1699 | 17160706 | C | 10.03 | 0.04472 |
| HSD17B4 | 1739 | 17453681 | C | −12.17 | 0.03437 |
| SNCAIP | 1748 | 1990879 | C | −10.98 | 0.02646 |
| ODZ2 | 1791 | 11952245 | G | 8.80 | 0.04092 |
| SLC22A23 | 1809 | 11967828 | T | 14.26 | 0.00461 |
| SLC22A23 | 1810 | 17136440 | T | 11.88 | 0.01855 |
| SLC22A23 | 1811 | 7747259 | T | 11.98 | 0.01871 |
| ATXN1 | 1836 | 720006 | A | 9.92 | 0.01942 |
| GABRR2 | 1920 | 6900958 | T | −11.49 | 0.02760 |
| KLHL32 | 1921 | 6922974 | A | 13.21 | 0.03354 |
| KLHL32 | 1923 | 998195 | C | −10.41 | 0.01262 |
| KLHL32 | 1924 | 1997933 | G | 9.90 | 0.02072 |
| SLC22A16 | 1932 | 7768422 | C | 15.08 | 0.04785 |
| HS3ST5 | 1934 | 1334900 | T | 9.23 | 0.03155 |
| TRDN | 1939 | 1431284 | G | −10.87 | 0.01718 |
| TRDN | 1940 | 17686735 | G | −11.08 | 0.01349 |
| TRDN | 1942 | 12190077 | A | −11.03 | 0.01496 |
| NKAIN2 | 1962 | 11753035 | A | 13.79 | 0.04159 |
| PDE7B | 1987 | 6938424 | T | 24.87 | 0.00239 |
| PDE7B | 1989 | 4475338 | T | 37.18 | 0.03146 |
| PARK2 | 2037 | 12192200 | C | 8.57 | 0.03638 |
| PARK2 | 2038 | 10945823 | A | 11.85 | 0.01815 |
| PARK2 | 2039 | 10945825 | A | 11.00 | 0.02079 |
| PARK2 | 2041 | 2105643 | C | 11.00 | 0.02079 |
| PARK2 | 2042 | 4708961 | T | 8.59 | 0.04701 |
| PDE10A | 2060 | 585208 | C | 12.17 | 0.02777 |
| PDE10A | 2061 | 566759 | G | 11.62 | 0.03342 |
| FERD3L | 2103 | 10228726 | G | −9.79 | 0.04191 |
| FERD3L | 2105 | 11766540 | C | −11.46 | 0.01666 |
| FERD3L | 2108 | 6967671 | T | 9.66 | 0.04524 |
| CREB5 | 2119 | 2237361 | C | −10.99 | 0.01522 |
| CREB5 | 2123 | 12538892 | A | −10.24 | 0.04037 |
| CHN2 | 2128 | 7781003 | T | 8.81 | 0.04292 |
| BMPER | 2165 | 7806522 | C | 9.75 | 0.04375 |
| BMPER | 2167 | 4140982 | A | 9.54 | 0.02586 |
| WBSCR17 | 2238 | 6971383 | A | 10.51 | 0.01012 |
| WBSCR17 | 2240 | 1859526 | T | 15.00 | 0.00083 |
| WBSCR17 | 2242 | 4585627 | T | 11.71 | 0.00419 |
| WBSCR17 | 2245 | 10279551 | G | 12.40 | 0.01521 |
| WBSCR17 | 2246 | 7783170 | C | 10.80 | 0.02237 |
| MAGI2 | 2274 | 758710 | C | −8.60 | 0.04552 |
| MAGI2 | 2279 | 848913 | C | −18.78 | 0.00215 |
| MAGI2 | 2297 | 10261439 | A | −16.51 | 0.00118 |
| MAGI2 | 2300 | 10248584 | G | −18.74 | 0.00178 |
| CACNA2D1 | 2308 | 258728 | A | 13.63 | 0.01824 |
| PCLO | 2316 | 7781142 | A | −9.66 | 0.02069 |
| PCLO | 2323 | 2371214 | C | 8.95 | 0.04471 |
| PCLO | 2324 | 2522843 | A | 8.57 | 0.04213 |
| PCLO | 2329 | 7799260 | G | −8.87 | 0.02973 |
| DYNC1I1 | 2386 | 1382620 | A | −8.27 | 0.04927 |
| DYNC1I1 | 2392 | 6968143 | G | −14.28 | 0.03029 |
| DYNC1I1 | 2393 | 2073984 | A | −8.92 | 0.04580 |
| ZNF3 | 2399 | 4424195 | G | 10.18 | 0.03333 |
| DGKI | 2473 | 834054 | T | 58.87 | 0.01393 |
| CNTNAP2 | 2498 | 7803992 | A | 10.51 | 0.01398 |
| CNTNAP2 | 2500 | 1525218 | T | 11.87 | 0.00588 |
| CNTNAP2 | 2501 | 1525259 | C | 8.85 | 0.04879 |
| CNTNAP2 | 2505 | 4726875 | A | 11.26 | 0.01023 |
| CNTNAP2 | 2506 | 1528507 | G | 11.26 | 0.01023 |
| CSMD1 | 2540 | 17065933 | A | 9.85 | 0.03080 |
| CSMD1 | 2542 | 17065959 | C | 11.01 | 0.02651 |
| MCPH1 | 2563 | 3020213 | T | 8.54 | 0.04516 |
| MCPH1 | 2565 | 3824312 | A | 10.12 | 0.04141 |
| XPO7 | 2621 | 1809498 | C | 10.91 | 0.00804 |
| XPO7 | 2623 | 3816786 | T | 10.90 | 0.00819 |
| SLC25A37 | 2632 | 10503726 | C | 10.65 | 0.02414 |
| SLC25A37 | 2633 | 7826247 | G | 14.80 | 0.00146 |
| NKAIN3 | 2704 | 4737609 | A | 15.16 | 0.02969 |
| NKAIN3 | 2716 | 4739023 | C | −9.90 | 0.01595 |
| NKAIN3 | 2719 | 4382471 | T | 9.45 | 0.04753 |
| NKAIN3 | 2721 | 10100456 | T | 9.45 | 0.04753 |
| KCNB2 | 2735 | 1431659 | T | 9.66 | 0.02773 |
| KCNB2 | 2737 | 349355 | T | 11.11 | 0.04899 |
| KCNB2 | 2740 | 7010480 | G | 8.56 | 0.03633 |
| GRHL2 | 2771 | 17397776 | T | 9.02 | 0.03416 |
| GRHL2 | 2772 | 17397811 | A | 8.91 | 0.03600 |
| ZFPM2 | 2801 | 12546300 | G | 8.80 | 0.04189 |
| ZFPM2 | 2807 | 2028553 | A | 11.63 | 0.01401 |
| SAMD12 | 2827 | 2514602 | A | 18.08 | 0.01693 |
| SAMD12 | 2829 | 2460983 | G | 24.02 | 0.00040 |
| FBXO32 | 2831 | 2294089 | C | −14.45 | 0.03866 |
| FER1L6 | 2834 | 6981430 | G | −8.38 | 0.04590 |
| FER1L6 | 2837 | 7831422 | G | −17.07 | 0.02009 |
| FER1L6 | 2838 | 12375254 | A | −16.10 | 0.02425 |
| FER1L6 | 2841 | 7012186 | T | −12.64 | 0.04795 |
| FER1L6 | 2847 | 4871463 | G | −10.19 | 0.03115 |
| COL22A1 | 2907 | 4475485 | T | 14.66 | 0.01144 |
| PTPRD | 2940 | 3843579 | C | 9.03 | 0.03728 |
| PTPRD | 2941 | 12555585 | G | 10.69 | 0.04498 |
| PTPRD | 2949 | 942176 | A | 8.57 | 0.04125 |
| PTPRD | 2956 | 7868093 | T | −13.29 | 0.00215 |
| TMC1 | 3039 | 10481772 | C | −15.33 | 0.01611 |
| PCSK5 | 3050 | 7862766 | T | −15.54 | 0.01957 |
| PCSK5 | 3051 | 2789610 | C | −11.58 | 0.02452 |
| PCSK5 | 3052 | 2789608 | G | −13.59 | 0.00380 |
| PCSK5 | 3053 | 4745488 | C | −9.53 | 0.04628 |
| GNAQ | 3059 | 1030828 | A | −11.43 | 0.00528 |
| GNAQ | 3060 | 11145565 | C | −10.32 | 0.01455 |
| GNAQ | 3070 | 6560625 | C | 10.71 | 0.03768 |
| NTRK2 | 3080 | 1036914 | C | 10.00 | 0.02856 |
| DAPK1 | 3082 | 6560011 | C | −8.82 | 0.03047 |
| PTGS1 | 3150 | 7864901 | G | −13.40 | 0.01478 |
| ABL1 | 3168 | 10901294 | T | 20.09 | 0.01102 |
| ABL1 | 3169 | 3824400 | A | 12.54 | 0.03932 |
| ABL1 | 3170 | 7021981 | T | 15.63 | 0.04125 |
| ABL1 | 3171 | 11792273 | G | 15.63 | 0.04125 |
| PNPLA7 | 3204 | 10867123 | G | −11.06 | 0.01613 |
| CACNA1B | 3210 | 1123190 | A | −11.33 | 0.03162 |
| CACNB2 | 3241 | 10764566 | G | −9.41 | 0.01861 |
| MYO3A | 3281 | 3758447 | C | −10.14 | 0.01847 |
| MYO3A | 3283 | 16926660 | A | 16.56 | 0.00830 |
| MYO3A | 3286 | 16926667 | A | 12.83 | 0.03051 |
| JMJD1C | 3301 | 9629895 | A | 11.33 | 0.00735 |
| CDH23 | 3309 | 9415039 | T | 9.60 | 0.01842 |
| KCNMA1 | 3319 | 2288840 | G | −8.37 | 0.04573 |
| KCNMA1 | 3320 | 7067873 | C | −8.67 | 0.04617 |
| KCNMA1 | 3326 | 548216 | C | 9.26 | 0.02968 |
| SORCS3 | 3370 | 752558 | C | 11.23 | 0.02285 |
| SORCS3 | 3371 | 10884026 | G | 10.72 | 0.04684 |
| VTI1A | 3389 | 9971308 | A | −12.82 | 0.01260 |
| VTI1A | 3390 | 6585156 | A | −12.82 | 0.01260 |
| ATE1 | 3450 | 11200257 | A | −15.96 | 0.00720 |
| ATE1 | 3452 | 7906462 | A | −11.96 | 0.01936 |
| CTBP2 | 3453 | 4962718 | C | 10.32 | 0.04535 |
| IGSF22 | 3515 | 12789252 | A | −9.95 | 0.01529 |
| KCNA4 | 3517 | 7931190 | T | 7.63 | 0.04487 |
| C11ORF49 | 3522 | 3740691 | A | −9.52 | 0.03894 |
| ELMOD1 | 3558 | 684901 | T | −11.84 | 0.01420 |
| OPCML | 3571 | 3016500 | T | 9.47 | 0.04326 |
| OPCML | 3589 | 4936195 | G | −13.29 | 0.03592 |
| TMEM16B | 3605 | 10466913 | A | 14.47 | 0.01253 |
| STYK1 | 3616 | 10743918 | C | −8.54 | 0.03431 |
| NAV3 | 3679 | 7137676 | T | 10.08 | 0.01847 |
| NBEA | 3715 | 7333195 | T | −14.55 | 0.00033 |
| NBEA | 3719 | 7320580 | G | 12.53 | 0.00547 |
| NBEA | 3720 | 7988705 | A | 10.21 | 0.03388 |
| TRPC4 | 3729 | 1556541 | C | −10.31 | 0.01559 |
| LMO7 | 3753 | 9573672 | T | 17.25 | 0.03651 |
| GPC5 | 3790 | 2148226 | G | −8.06 | 0.04086 |
| NALCN | 3828 | 11069434 | C | 8.70 | 0.02327 |
| NALCN | 3829 | 9518353 | C | 8.09 | 0.03943 |
| NOVA1 | 3856 | 178205 | A | −10.11 | 0.04524 |
| NOVA1 | 3861 | 1955850 | G | −8.98 | 0.03229 |
| NPAS3 | 3866 | 243291 | G | −8.30 | 0.04225 |
| NPAS3 | 3869 | 1579702 | G | −13.16 | 0.00059 |
| NPAS3 | 3871 | 10133530 | A | 12.90 | 0.01481 |
| SLC25A21 | 3878 | 2073248 | C | 17.11 | 0.02495 |
| SLC25A21 | 3879 | 12185044 | G | 17.49 | 0.04144 |
| SLC25A21 | 3882 | 2022601 | A | −12.40 | 0.00297 |
| SLC25A21 | 3883 | 10872897 | T | −12.33 | 0.00329 |
| SLC25A21 | 3885 | 1367029 | A | −8.06 | 0.04998 |
| PPP2R5E | 3922 | 7140704 | G | −15.31 | 0.01036 |
| RGS6 | 3944 | 2681749 | C | −8.81 | 0.03842 |
| RGS6 | 3952 | 2238192 | A | −11.04 | 0.00721 |
| NRXN3 | 3955 | 4020132 | T | 22.49 | 0.01259 |
| KCNK10 | 3960 | 411627 | C | 9.62 | 0.03242 |
| CCDC88C | 3983 | 8015982 | C | −9.12 | 0.04057 |
| CCDC88C | 3984 | 10131741 | G | −9.12 | 0.04057 |
| CCDC88C | 3985 | 8008996 | T | −9.12 | 0.04057 |
| CCDC88C | 3986 | 8007791 | A | −9.12 | 0.04057 |
| BCL11B | 3999 | 807567 | C | −13.61 | 0.01511 |
| ATP10A | 4016 | 2066704 | A | −21.04 | 0.01347 |
| RYR3 | 4028 | 16957065 | G | −9.77 | 0.03092 |
| MEIS2 | 4049 | 1562804 | T | 8.07 | 0.02567 |
| CGNL1 | 4068 | 4774257 | G | 9.24 | 0.03544 |
| CGNL1 | 4069 | 4774940 | C | −10.55 | 0.01298 |
| CGNL1 | 4070 | 7182648 | T | −10.00 | 0.02481 |
| CLK3 | 4084 | 12441932 | G | 18.04 | 0.00243 |
| CLK3 | 4085 | 2068982 | A | 15.44 | 0.00974 |
| A2BP1 | 4114 | 1420058 | C | −8.62 | 0.04650 |
| A2BP1 | 4120 | 1492382 | C | 11.69 | 0.01883 |
| WWOX | 4152 | 1922620 | C | 8.47 | 0.04436 |
| MPHOSPH6 | 4163 | 8052512 | T | −15.17 | 0.00973 |
| MPHOSPH6 | 4168 | 11645604 | A | −11.69 | 0.04876 |
| CRISPLD2 | 4212 | 2641698 | T | −9.24 | 0.03290 |
| CA10 | 4235 | 1501253 | G | −8.04 | 0.03701 |
| CA10 | 4238 | 2970016 | G | 9.50 | 0.02212 |
| CA10 | 4240 | 1503058 | A | −8.63 | 0.03181 |
| ZFP161 | 4286 | 12604181 | T | 22.46 | 0.02818 |
| PTPRM | 4303 | 2509550 | G | −10.26 | 0.01680 |
| CHST9 | 4317 | 4800797 | G | −10.74 | 0.02272 |
| NEDD4L | 4320 | 7243662 | G | −14.91 | 0.00869 |
| NEDD4L | 4323 | 292448 | C | −12.19 | 0.01301 |
| CCBE1 | 4340 | 2851865 | T | 10.87 | 0.01560 |
| CCBE1 | 4342 | 2564495 | G | 8.94 | 0.03843 |
| CCBE1 | 4343 | 1560299 | T | 8.11 | 0.03784 |
| CCBE1 | 4345 | 9954124 | T | 9.08 | 0.03681 |
| DOK6 | 4378 | 8097743 | G | −7.73 | 0.04573 |
| ATRN | 4391 | 2670300 | G | −8.57 | 0.04216 |
| FERMT1 | 4411 | 8121939 | G | 8.87 | 0.03128 |
| PLCB1 | 4432 | 6118375 | C | 11.83 | 0.00946 |
| MACROD2 | 4458 | 7509422 | T | −8.81 | 0.03627 |
| PTPRT | 4494 | 2866940 | C | 9.51 | 0.02822 |
| PTGIS | 4523 | 515633 | A | −15.94 | 0.03724 |
| SNAI1 | 4524 | 6020157 | A | 13.30 | 0.02592 |
| CDH4 | 4529 | 4347903 | C | 10.21 | 0.04356 |
| CDH4 | 4530 | 4812313 | G | 8.52 | 0.04953 |
| NCAM2 | 4549 | 2826852 | C | 8.43 | 0.03889 |
| NCAM2 | 4550 | 973045 | A | −8.31 | 0.04192 |
| NCAM2 | 4551 | 986917 | A | 8.13 | 0.04547 |
| PCP4 | 4556 | 398802 | G | −7.92 | 0.04088 |
| PDE9A | 4562 | 2269145 | T | 13.28 | 0.00086 |
| PDE9A | 4564 | 12626774 | C | −13.28 | 0.00269 |

TABLE 5
Alleles Influencing Response to Ziprasidone

| | | | | Beta | |
|---|---|---|---|---|---|
| Gene | Seq ID | NCBI RS# | Allele | (PANSS) | P |
| KIF1B | 3 | 4240911 | C | 9.08 | 0.03275 |
| KIF1B | 5 | 17401966 | G | 10.00 | 0.02342 |
| KIF1B | 6 | 12734551 | G | 9.47 | 0.02466 |
| RP1-21O18.1 | 9 | 7539545 | T | −7.22 | 0.02811 |
| AGBL4-C1ORF165 | 27 | 1934395 | G | −11.79 | 0.01637 |
| LRP8 | 59 | 1416095 | C | 8.99 | 0.02855 |
| ELTD1 | 61 | 2200810 | G | −14.72 | 0.00145 |
| ELTD1 | 62 | 7552978 | A | 12.31 | 0.00046 |
| ELTD1 | 63 | 12754818 | C | 9.47 | 0.00493 |
| ELTD1 | 64 | 1352555 | A | 11.66 | 0.00104 |
| ELTD1 | 66 | 10493622 | A | 12.10 | 0.00123 |
| PTGFRN | 92 | 1998922 | A | 10.85 | 0.01631 |
| ATF6 | 99 | 1875762 | T | 13.32 | 0.04286 |
| OLFML2B | 111 | 12025136 | C | 9.46 | 0.03799 |
| DPT | 121 | 6427142 | G | −12.75 | 0.02446 |
| RYR2 | 204 | 4376724 | C | 9.25 | 0.00789 |
| C2ORF46 | 277 | 2562011 | C | 12.31 | 0.04666 |
| C2ORF46 | 279 | 10210006 | C | −6.98 | 0.04505 |
| KLHL29 | 297 | 17045574 | A | 39.49 | 0.00049 |
| BRE | 316 | 9309659 | G | −10.32 | 0.01956 |
| CRIM1 | 333 | 11681392 | T | −8.28 | 0.03510 |
| FEZ2 | 335 | 3770811 | T | −7.78 | 0.04220 |
| FEZ2 | 336 | 1533946 | G | −7.68 | 0.04228 |
| FEZ2 | 339 | 1179494 | C | 8.62 | 0.03384 |
| C2ORF34 | 364 | 1067378 | A | 9.91 | 0.01158 |
| C2ORF34 | 365 | 1067404 | A | 8.35 | 0.02429 |
| C2ORF34 | 367 | 698792 | A | 8.35 | 0.02429 |
| C2ORF34 | 373 | 1965789 | C | 8.02 | 0.02728 |
| AAK1 | 441 | 12622388 | G | −9.39 | 0.02387 |
| NAP5 | 477 | 1437909 | G | 8.12 | 0.03817 |
| ZRANB3 | 490 | 11893424 | A | 19.63 | 0.04721 |
| ZRANB3 | 491 | 1898524 | T | 19.63 | 0.04721 |
| ARHGAP15 | 549 | 12478952 | A | −13.03 | 0.01912 |
| ARHGAP15 | 560 | 10928200 | T | −7.07 | 0.03531 |
| ARHGAP15 | 561 | 13031917 | C | −7.07 | 0.03531 |
| FMNL2 | 587 | 1561267 | C | 12.60 | 0.03280 |
| SCN1A | 620 | 6432860 | A | 8.55 | 0.04669 |
| CERKL | 633 | 993650 | G | 9.92 | 0.02526 |
| PDE1A | 643 | 10497597 | T | −10.66 | 0.00616 |
| PDE1A | 645 | 11689230 | T | −9.45 | 0.01172 |
| NRP2 | 673 | 13396083 | C | 9.55 | 0.01084 |
| NRP2 | 674 | 7596827 | C | 8.96 | 0.01293 |
| NRP2 | 675 | 6435306 | A | 8.36 | 0.02085 |
| ERBB4 | 681 | 7563759 | A | 8.41 | 0.02528 |
| ERBB4 | 683 | 4672668 | G | 7.81 | 0.02546 |
| DNER | 718 | 208791 | A | −14.15 | 0.01544 |
| DNER | 719 | 208784 | G | −14.15 | 0.01544 |
| DNER | 720 | 208785 | G | −14.15 | 0.01544 |
| DNER | 721 | 1323595 | T | −14.15 | 0.01544 |
| DNER | 722 | 208787 | G | −14.15 | 0.01544 |
| TRIP12 | 723 | 6723005 | T | −14.15 | 0.01544 |
| CNTN4 | 763 | 1032783 | A | 12.09 | 0.02697 |
| ITPR1 | 776 | 3792490 | A | 8.08 | 0.04869 |
| SLC6A6 | 794 | 1156567 | C | −11.62 | 0.03731 |
| DAZL | 799 | 17029179 | C | −10.70 | 0.03316 |
| ULK4 | 828 | 4973875 | C | 8.31 | 0.02284 |
| ULK4 | 831 | 6790569 | A | 10.17 | 0.01511 |
| ULK4 | 832 | 9827383 | C | 9.98 | 0.00929 |
| ULK4 | 833 | 10510719 | A | 9.64 | 0.01466 |
| ULK4 | 836 | 9311275 | C | 12.05 | 0.00193 |
| ULK4 | 837 | 9818955 | C | 12.24 | 0.00284 |
| ULK4 | 841 | 6809441 | C | 9.93 | 0.00808 |
| ULK4 | 842 | 11129908 | A | 7.58 | 0.04141 |
| ULK4 | 843 | 7618902 | G | 10.22 | 0.00563 |
| ULK4 | 848 | 9825741 | A | 13.26 | 0.02411 |
| ULK4 | 849 | 17062109 | T | 12.68 | 0.02961 |
| ULK4 | 850 | 7648578 | T | 12.68 | 0.02961 |
| ULK4 | 851 | 3774372 | C | 12.68 | 0.02961 |
| ULK4 | 852 | 1716685 | T | 12.68 | 0.02961 |
| ULK4 | 853 | 2272007 | A | 12.68 | 0.02961 |
| CACNA2D3 | 874 | 3773580 | T | −12.03 | 0.00211 |
| CACNA2D3 | 875 | 3773569 | A | −10.79 | 0.00484 |
| FLNB | 910 | 12488636 | C | 9.12 | 0.00750 |
| FLNB | 911 | 12632456 | A | 8.96 | 0.00820 |
| FLNB | 912 | 7632986 | T | 10.69 | 0.00179 |
| PRICKLE2 | 964 | 696017 | A | 19.24 | 0.01331 |
| PRICKLE2 | 969 | 704398 | G | 16.10 | 0.02652 |
| PRICKLE2 | 970 | 697288 | T | 14.55 | 0.03537 |
| CDGAP | 1018 | 7649930 | G | −7.50 | 0.03792 |
| CDGAP | 1019 | 1448434 | C | −7.50 | 0.03792 |
| CDGAP | 1020 | 6438523 | A | −7.50 | 0.03792 |
| CDGAP | 1022 | 6773050 | C | 7.89 | 0.04425 |
| CPNE4 | 1060 | 2178383 | G | 9.24 | 0.00878 |
| TNIK | 1099 | 4955765 | G | 7.90 | 0.04965 |
| PLD1 | 1104 | 181715 | T | 14.25 | 0.00070 |
| LRRC15 | 1150 | 6799698 | A | 9.95 | 0.04529 |
| SLC2A9 | 1162 | 13101772 | A | −16.65 | 0.03403 |
| LIMCH1 | 1218 | 10026397 | A | −13.48 | 0.01236 |
| LIMCH1 | 1219 | 4386634 | G | −12.75 | 0.01513 |
| LIMCH1 | 1220 | 10006669 | A | −12.75 | 0.01513 |
| LIMCH1 | 1221 | 10026359 | T | −11.52 | 0.01534 |
| HERC3 | 1275 | 3796660 | A | −17.26 | 0.04705 |
| HERC3 | 1276 | 2924942 | T | −9.92 | 0.02467 |
| HERC3 | 1277 | 3017925 | T | −10.56 | 0.01611 |
| HERC3 | 1278 | 2972021 | A | −9.92 | 0.02467 |
| HERC3 | 1279 | 2972038 | T | −9.95 | 0.04291 |
| FAM13A1 | 1285 | 17817631 | T | 13.13 | 0.01292 |
| PAPSS1 | 1310 | 2522421 | G | −19.38 | 0.00665 |
| PAPSS1 | 1311 | 2522422 | A | −19.38 | 0.00665 |
| PAPSS1 | 1312 | 2522428 | C | −15.11 | 0.02685 |
| PAPSS1 | 1313 | 4956136 | C | −14.48 | 0.00984 |
| PAPSS1 | 1314 | 2158179 | G | −13.68 | 0.02076 |
| ANK2 | 1351 | 29306 | G | 9.03 | 0.02869 |
| GPR103 | 1380 | 17371804 | T | 8.54 | 0.03946 |
| GPR103 | 1382 | 2013332 | A | −15.60 | 0.00293 |
| GPR103 | 1385 | 17438900 | C | 8.54 | 0.03946 |
| MAML3 | 1395 | 11729794 | T | −11.65 | 0.01147 |
| MAML3 | 1398 | 1350036 | T | −10.40 | 0.01532 |
| IL15 | 1402 | 7671019 | A | −7.91 | 0.03444 |
| IL15 | 1403 | 6841939 | A | −8.22 | 0.03983 |
| IL15 | 1404 | 2139383 | C | 7.33 | 0.04215 |
| INPP4B | 1418 | 3775655 | C | 14.59 | 0.04575 |
| INPP4B | 1419 | 7697702 | C | 23.21 | 0.00625 |
| FSTL5 | 1461 | 45426 | T | −7.95 | 0.03181 |
| SEMA5A | 1535 | 985723 | A | 10.49 | 0.03673 |
| SEMA5A | 1545 | 150631 | A | −8.47 | 0.02109 |
| DNAH5 | 1563 | 16902955 | G | −8.35 | 0.04972 |
| DNAH5 | 1564 | 16902956 | C | −8.35 | 0.04972 |
| DNAH5 | 1565 | 16902957 | T | −8.35 | 0.04972 |
| DNAH5 | 1566 | 9312854 | C | −8.35 | 0.04972 |
| SLC1A3 | 1586 | 6451305 | C | 7.61 | 0.03994 |
| ITGA1 | 1615 | 1047481 | G | −9.04 | 0.00979 |
| ITGA1 | 1616 | 6882655 | A | −11.32 | 0.00790 |
| ITGA2 | 1617 | 989073 | A | −10.83 | 0.01968 |
| TNPO1 | 1641 | 34653 | T | −11.03 | 0.03445 |
| TNPO1 | 1643 | 266444 | C | −10.77 | 0.04440 |
| TNPO1 | 1644 | 2548331 | A | 9.45 | 0.01692 |
| FCHO2 | 1646 | 185435 | G | −10.77 | 0.04440 |
| FBXL17 | 1707 | 6596770 | C | 8.67 | 0.02289 |
| FBXL17 | 1709 | 2966805 | C | 8.32 | 0.03874 |
| FBXL17 | 1715 | 12521975 | T | 8.32 | 0.03874 |
| FBXL17 | 1716 | 6875297 | A | 8.40 | 0.03232 |
| KCNN2 | 1724 | 1457762 | A | −9.30 | 0.04162 |
| KCNN2 | 1725 | 4705504 | T | −8.88 | 0.04674 |
| KCNN2 | 1731 | 10519388 | C | −12.61 | 0.00346 |
| FTMT | 1747 | 10447274 | C | −9.11 | 0.02638 |
| TRPC7 | 1775 | 3777145 | T | 16.55 | 0.00264 |
| TRPC7 | 1778 | 950714 | G | 16.55 | 0.00264 |
| TRPC7 | 1779 | 2649691 | A | 13.42 | 0.01087 |
| ODZ2 | 1789 | 1421989 | G | −9.39 | 0.03638 |
| ODZ2 | 1798 | 3733988 | T | −8.71 | 0.01095 |
| ODZ2 | 1799 | 1422421 | T | −10.86 | 0.00222 |
| WWC1 | 1801 | 6893982 | C | 12.00 | 0.01232 |
| ELOVL5 | 1889 | 1429146 | T | −10.60 | 0.00409 |
| ELOVL5 | 1892 | 209500 | T | 9.45 | 0.00823 |
| ELOVL5 | 1893 | 9357760 | G | −7.45 | 0.04511 |
| ELOVL5 | 1894 | 9370196 | C | −7.45 | 0.04511 |
| RIMS1 | 1917 | 12525154 | A | 9.94 | 0.04287 |
| GABRR2 | 1919 | 4707535 | T | 8.96 | 0.04355 |
| GABRR2 | 1920 | 6900958 | T | −8.72 | 0.02592 |
| KLHL32 | 1921 | 6922974 | A | 9.93 | 0.01589 |
| SLC22A16 | 1926 | 9400390 | T | 9.54 | 0.01475 |
| NKAIN2 | 1957 | 173067 | A | −7.30 | 0.04805 |
| PLAGL1 | 1990 | 9321951 | T | −10.19 | 0.02081 |
| PLAGL1 | 1991 | 9390148 | A | 8.51 | 0.03238 |
| SYNE1 | 2006 | 1844356 | G | 8.52 | 0.04995 |
| PARK2 | 2044 | 7750033 | T | 9.93 | 0.01042 |
| PARK2 | 2045 | 9364662 | A | −12.54 | 0.00244 |
| PARK2 | 2046 | 9458610 | G | −12.54 | 0.00244 |
| PARK2 | 2048 | 2803045 | T | −8.51 | 0.03522 |
| PAPK2 | 2049 | 9456810 | C | 9.23 | 0.01868 |
| SCIN | 2092 | 2240571 | G | −9.01 | 0.00416 |
| SCIN | 2093 | 1034856 | T | 7.28 | 0.04436 |
| FERD3L | 2106 | 6963269 | G | −9.84 | 0.02537 |
| FERD3L | 2107 | 6967799 | T | −9.58 | 0.04433 |
| FERD3L | 2109 | 6461422 | G | −9.35 | 0.04636 |
| FLJ22374 | 2148 | 10229281 | A | 14.63 | 0.02392 |
| FLJ22374 | 2149 | 10235270 | C | 10.38 | 0.03228 |
| PDE1C | 2157 | 17336016 | G | −8.89 | 0.03168 |
| EEPD1 | 2171 | 11765336 | C | 6.82 | 0.04860 |
| ABCA13 | 2214 | 6958356 | A | −8.36 | 0.03159 |
| HIP1 | 2255 | 1167802 | C | −11.66 | 0.00744 |
| MAGI2 | 2287 | 1990432 | A | −11.65 | 0.01842 |
| MAGI2 | 2288 | 6466535 | C | −14.03 | 0.00601 |
| ABCB4 | 2351 | 31662 | A | −15.48 | 0.02305 |
| ABCB4 | 2352 | 31669 | A | −17.13 | 0.01857 |
| CUX1 | 2404 | 2960266 | A | 8.19 | 0.04899 |
| CUX1 | 2406 | 10277680 | A | 7.91 | 0.04274 |
| CUX1 | 2407 | 12537077 | T | 7.18 | 0.04337 |
| DGKI | 2477 | 4728414 | C | −7.79 | 0.04962 |
| CNTNAP2 | 2508 | 1637864 | T | 11.76 | 0.01832 |
| CNTNAP2 | 2509 | 1637840 | T | 11.76 | 0.01832 |
| PTPRN2 | 2528 | 6459879 | C | −11.04 | 0.00677 |
| PTPRN2 | 2529 | 1377374 | T | −11.04 | 0.00677 |
| PTPRN2 | 2530 | 11765319 | G | 13.12 | 0.00710 |
| PTPRN2 | 2531 | 4909222 | G | 13.91 | 0.00809 |
| CSMD1 | 2549 | 2938236 | T | −15.96 | 0.02797 |
| MCPH1 | 2559 | 2916741 | G | 13.30 | 0.00549 |
| MCPH1 | 2560 | 2442497 | G | 14.30 | 0.02113 |
| MCPH1 | 2561 | 2442496 | G | 14.28 | 0.00299 |
| MCPH1 | 2562 | 2442492 | T | 14.28 | 0.00299 |
| PSD3 | 2609 | 11782622 | C | −11.34 | 0.03407 |
| GFRA2 | 2618 | 17427734 | A | 13.63 | 0.00068 |
| PPP3CC | 2625 | 13271367 | G | −7.38 | 0.04313 |
| LYN | 2673 | 1546518 | C | −10.47 | 0.00218 |
| NKAIN3 | 2722 | 11989852 | A | 13.50 | 0.02102 |
| NKAIN3 | 2724 | 17279355 | G | 11.60 | 0.03751 |
| DEPDC2 | 2732 | 7007570 | G | 8.82 | 0.01437 |
| DEPDC2 | 2733 | 13262547 | G | −7.34 | 0.03639 |
| SAMD12 | 2828 | 16891338 | G | 22.53 | 0.02160 |
| FBXO32 | 2830 | 6990407 | G | 10.85 | 0.02815 |
| FER1L6 | 2835 | 7819813 | A | −7.58 | 0.04488 |
| FER1L6 | 2836 | 11784115 | A | −7.58 | 0.04488 |
| MTSS1 | 2856 | 6470298 | A | −39.87 | 0.01587 |
| SMARCA2 | 2930 | 7875236 | C | −13.17 | 0.00109 |
| SMARCA2 | 2931 | 2147263 | T | 7.25 | 0.04908 |
| SMARCA2 | 2932 | 4741650 | T | −10.01 | 0.01459 |
| PTPRD | 2943 | 10124689 | T | 9.95 | 0.01535 |
| PTPRD | 2944 | 7036240 | A | −9.33 | 0.01486 |
| PTPRD | 2946 | 10977089 | C | 8.82 | 0.03318 |
| PTPRD | 2947 | 2031216 | G | 9.27 | 0.01691 |
| PTPRD | 2948 | 4742502 | C | −8.17 | 0.02984 |
| PTPRD | 2951 | 7027844 | C | −8.34 | 0.03640 |
| MAMDC2 | 3014 | 1927143 | T | −15.03 | 0.00891 |
| MAMDC2 | 3017 | 2773362 | T | −11.08 | 0.04760 |
| TRPM3 | 3022 | 10868855 | C | 12.72 | 0.00762 |
| TRPM3 | 3024 | 12552572 | C | −8.80 | 0.04786 |
| GNAQ | 3062 | 4641131 | A | −10.73 | 0.01174 |
| GNAQ | 3063 | 4745687 | G | −10.16 | 0.01341 |
| GNAQ | 3064 | 11145653 | A | −10.16 | 0.01341 |
| GNAQ | 3066 | 964423 | T | −10.16 | 0.01341 |
| GNAQ | 3067 | 4744858 | A | −9.59 | 0.02990 |
| GNAQ | 3068 | 10781482 | T | −9.59 | 0.02990 |
| GNAQ | 3069 | 7038083 | G | 8.74 | 0.01344 |
| NFIL3 | 3092 | 7038686 | A | 14.05 | 0.00033 |
| NFIL3 | 3093 | 4743835 | A | 10.03 | 0.01351 |
| NFIL3 | 3094 | 4743836 | T | 12.65 | 0.00373 |
| NFIL3 | 3095 | 4743837 | A | 12.65 | 0.00373 |
| HIATL1 | 3099 | 9409765 | A | −9.40 | 0.01148 |
| HIATL1 | 3100 | 9409552 | G | −9.40 | 0.01148 |
| GABBR2 | 3103 | 3824451 | G | −12.63 | 0.02597 |
| SVEP1 | 3124 | 963143 | A | 9.18 | 0.00632 |
| SVEP1 | 3125 | 1571236 | T | −8.54 | 0.02390 |
| CDK5RAP2 | 3137 | 4837771 | T | −10.50 | 0.01603 |
| CDK5RAP2 | 3138 | 3750494 | G | −10.11 | 0.03530 |
| CDK5RAP2 | 3139 | 10818467 | C | −12.93 | 0.04769 |
| NPDC1 | 3202 | 4880195 | C | −9.44 | 0.03379 |
| PITRM1 | 3222 | 6602036 | A | 8.85 | 0.04411 |
| PRKCQ | 3227 | 582052 | G | 8.68 | 0.01225 |
| PRKCQ | 3229 | 1889001 | A | 8.68 | 0.01225 |
| CACNB2 | 3238 | 7923191 | G | 8.88 | 0.04690 |
| ARMC3 | 3243 | 10764350 | T | 10.37 | 0.00789 |
| ARMC3 | 3244 | 7899968 | A | 9.89 | 0.00865 |
| ARMC3 | 3246 | 7919349 | G | 12.06 | 0.00295 |
| ARMC3 | 3247 | 1171136 | A | 9.81 | 0.01694 |
| ARMC3 | 3250 | 10828389 | T | 8.40 | 0.03457 |
| MYO3A | 3283 | 16926660 | A | −20.85 | 0.01378 |
| SLC16A9 | 3294 | 10128501 | G | −7.21 | 0.03515 |
| CDH23 | 3305 | 17635709 | T | −9.49 | 0.02234 |
| KCNMA1 | 3319 | 2288840 | G | −8.61 | 0.04504 |
| KCNMA1 | 3321 | 7069982 | A | −8.37 | 0.04942 |
| NRG3 | 3339 | 17099789 | G | −9.84 | 0.02486 |
| NRG3 | 3344 | 342361 | G | 8.89 | 0.02602 |
| SORBS1 | 3363 | 11188299 | C | 48.52 | 0.00262 |
| SORCS3 | 3384 | 10160134 | A | 9.25 | 0.02013 |
| SORCS3 | 3385 | 697189 | C | 9.21 | 0.02224 |
| SORCS3 | 3386 | 697190 | C | 8.60 | 0.03054 |
| SORCS3 | 3387 | 7092104 | C | −8.26 | 0.04870 |
| HSPA12A | 3424 | 12777585 | C | −13.87 | 0.00037 |
| GALNTL4 | 3468 | 4910288 | A | 8.82 | 0.01247 |
| GALNTL4 | 3469 | 4910289 | C | 10.74 | 0.00517 |
| ARNTL | 3487 | 10832012 | C | 10.79 | 0.00913 |
| ARNTL | 3488 | 900144 | G | 10.54 | 0.00720 |
| ARNTL | 3491 | 10766073 | A | 11.30 | 0.00573 |
| ARNTL | 3492 | 10832020 | C | 14.35 | 0.00676 |
| ARNTL | 3493 | 9633835 | A | 10.92 | 0.00651 |
| DLG2 | 3526 | 11233565 | C | 18.75 | 0.03009 |
| DLG2 | 3527 | 3793946 | T | 7.93 | 0.03160 |
| ELMOD1 | 3557 | 494957 | C | −10.69 | 0.01804 |
| OPCML | 3568 | 3018406 | A | −10.82 | 0.01137 |
| LOC729025 | 3626 | 1671486 | T | −13.53 | 0.01429 |
| LOC729025 | 3627 | 10734895 | A | −12.68 | 0.01666 |
| CNOT2 | 3641 | 2118427 | T | −13.61 | 0.03659 |
| CNOT2 | 3647 | 11178177 | T | −10.06 | 0.00931 |
| CNOT2 | 3648 | 10506586 | A | −14.16 | 0.03891 |
| CNOT2 | 3650 | 3817486 | G | −14.16 | 0.03891 |
| CNOT2 | 3652 | 3817487 | A | −7.20 | 0.04872 |
| NAV3 | 3663 | 11106732 | G | 10.46 | 0.01720 |
| NAV3 | 3664 | 939458 | G | 9.28 | 0.03656 |
| NAV3 | 3675 | 10859738 | A | −8.05 | 0.04335 |
| NBEA | 3704 | 2322289 | C | 11.51 | 0.02846 |
| NBEA | 3705 | 867503 | C | 17.05 | 0.00137 |
| NBEA | 3706 | 9600364 | C | 13.81 | 0.04421 |
| NBEA | 3707 | 2243774 | C | 12.69 | 0.00924 |
| NBEA | 3708 | 1160720 | G | 12.69 | 0.00924 |
| NBEA | 3712 | 9544444 | A | −7.51 | 0.04242 |
| NBEA | 3713 | 1381476 | A | −7.12 | 0.04902 |
| FNDC3A | 3734 | 7321178 | G | −9.01 | 0.04261 |
| LMO7 | 3743 | 9530467 | G | −7.04 | 0.04602 |
| GPC6 | 3798 | 995810 | C | 10.54 | 0.03120 |
| GPC6 | 3799 | 1323974 | C | 10.54 | 0.03120 |
| NALCN | 3826 | 655365 | A | 10.44 | 0.03287 |
| WDR23 | 3854 | 6573565 | A | −8.66 | 0.03293 |
| WDR23 | 3855 | 11574503 | C | −8.66 | 0.03293 |
| SLC25A21 | 3878 | 2073248 | C | −19.35 | 0.02491 |
| LRFN5 | 3898 | 1241781 | G | −9.72 | 0.00583 |
| LRFN5 | 3900 | 4143896 | A | −10.07 | 0.00549 |
| LRFN5 | 3901 | 8020273 | G | −9.22 | 0.01337 |
| LRFN5 | 3903 | 17112319 | A | −8.32 | 0.02770 |
| RGS6 | 3930 | 2332699 | C | 8.96 | 0.01512 |
| NRXN3 | 3955 | 4020132 | T | 15.65 | 0.01514 |
| KCNK10 | 3965 | 17698533 | C | 8.48 | 0.01786 |
| KCNK10 | 3966 | 12185033 | T | 8.33 | 0.02138 |
| RYR3 | 4021 | 1980102 | A | −8.62 | 0.03936 |
| RYR3 | 4030 | 1390159 | T | 28.21 | 0.01695 |
| RYR3 | 4031 | 2132208 | A | 18.48 | 0.01782 |
| C15ORF41 | 4037 | 4923719 | G | −9.69 | 0.04662 |
| GLDN | 4056 | 17524318 | A | 9.41 | 0.04870 |
| GLDN | 4063 | 17648140 | G | 10.39 | 0.02065 |
| CGNL1 | 4074 | 2131730 | T | −12.53 | 0.01317 |
| CGNL1 | 4075 | 2131731 | G | −12.53 | 0.01317 |
| CGNL1 | 4077 | 2932209 | G | −12.10 | 0.01505 |
| ARNT2 | 4104 | 4778836 | T | 9.58 | 0.01514 |
| ARNT2 | 4105 | 7180510 | G | 8.54 | 0.03190 |
| A2BP1 | 4135 | 11648047 | C | 12.29 | 0.02677 |
| A2BP1 | 4136 | 2079753 | T | 10.95 | 0.04625 |
| TMC5 | 4141 | 1023446 | C | −7.95 | 0.02869 |
| MPHOSPH6 | 4162 | 7405231 | C | −8.41 | 0.01341 |
| MPHOSPH6 | 4168 | 11645604 | A | 9.19 | 0.03174 |
| MPHOSPH6 | 4170 | 2967355 | A | −8.48 | 0.04369 |
| CDH13 | 4202 | 889491 | T | −9.24 | 0.02597 |
| CRISPLD2 | 4217 | 11862286 | A | 12.81 | 0.04030 |
| ZFP161 | 4282 | 990072 | T | 9.74 | 0.03711 |
| PTPRM | 4297 | 2230601 | C | 9.94 | 0.00699 |
| PTPRM | 4299 | 507445 | T | 10.76 | 0.00511 |
| PTPRM | 4300 | 630778 | G | 8.63 | 0.02079 |
| PTPRM | 4301 | 6506572 | T | 7.69 | 0.02980 |
| PTPRM | 4302 | 9949149 | C | 7.69 | 0.02980 |
| NEDD4L | 4328 | 4940385 | C | −8.10 | 0.02725 |
| NEDD4L | 4333 | 12373325 | T | −8.73 | 0.03815 |
| CDH20 | 4348 | 1509128 | T | −7.19 | 0.03575 |
| FERMT1 | 4408 | 6117065 | A | 9.07 | 0.02962 |
| JAG1 | 4439 | 3748477 | T | 22.35 | 0.00872 |
| JAG1 | 4440 | 3748478 | T | 21.96 | 0.01027 |
| SNAI1 | 4524 | 6020157 | A | 9.47 | 0.03580 |
| SNAI1 | 4526 | 16995010 | C | 11.56 | 0.04852 |
| SNAI1 | 4528 | 6020187 | G | 12.58 | 0.01606 |
| NCAM2 | 4542 | 2826349 | G | −11.69 | 0.01381 |
| NCAM2 | 4543 | 2826351 | A | −11.69 | 0.01381 |
| NCAM2 | 4551 | 986917 | A | 9.05 | 0.02234 |
| PCP4 | 4557 | 2837279 | C | 10.32 | 0.04030 |
| PCP4 | 4559 | 2837283 | T | 10.32 | 0.04030 |
| ARVCF | 4567 | 1110477 | C | 34.11 | 0.00323 |
| ARVCF | 4568 | 887200 | C | 25.02 | 0.01002 |
| ARVCF | 4570 | 887203 | A | 34.11 | 0.00323 |
| HPS4 | 4574 | 5761552 | T | −7.93 | 0.02600 |
| HPS4 | 4577 | 5761557 | A | −11.17 | 0.04242 |
| EFCAB6 | 4604 | 6006521 | G | −8.28 | 0.03345 |
| EFCAB6 | 4607 | 1894489 | A | −8.28 | 0.03345 |

TABLE 6
Alleles Influencing Time to Discontinuation for Olanzapine

| Gene | Seq ID | NCBI RS# | Allele | Beta (Months) | P |
|---|---|---|---|---|---|
| SCP2 | 39 | 7528867 | A | −5.09 | 0.03956 |
| PRKACB | 74 | 2642186 | G | −3.69 | 0.02840 |
| NGF | 82 | 7513144 | C | −6.44 | 0.00532 |
| NGF | 84 | 17033706 | A | −5.62 | 0.01618 |
| ATF6 | 100 | 2089083 | T | 5.20 | 0.02796 |
| FAM78B | 114 | 4072242 | T | 3.71 | 0.01635 |
| FAM78B | 115 | 4339838 | A | 3.71 | 0.01635 |
| FAM78B | 116 | 6426968 | T | 3.46 | 0.02396 |
| FAM78B | 117 | 1002160 | A | 3.74 | 0.02369 |
| FAM78B | 118 | 7521995 | C | 3.59 | 0.03082 |
| USH2A | 157 | 11120703 | C | −4.96 | 0.03071 |
| GNG4 | 192 | 10925976 | A | −3.29 | 0.02209 |
| GNG4 | 193 | 508208 | G | 3.22 | 0.02748 |
| RYR2 | 203 | 4659786 | A | −3.34 | 0.02006 |
| RYR2 | 204 | 4376724 | C | 3.24 | 0.03034 |
| RYR2 | 205 | 3924864 | C | −4.71 | 0.01844 |
| ASXL2 | 302 | 10180842 | G | −3.88 | 0.03025 |
| ASXL2 | 303 | 1076000 | A | −3.88 | 0.03025 |
| ASXL2 | 304 | 6758088 | A | −3.61 | 0.04493 |
| ASXL2 | 305 | 10182811 | T | −3.61 | 0.04493 |
| BRE | 323 | 6747817 | G | −3.45 | 0.02410 |
| SLC8A1 | 350 | 4952404 | T | −3.88 | 0.03259 |
| PRKCE | 376 | 666334 | T | 3.33 | 0.04249 |
| EPAS1 | 393 | 7589621 | A | 3.87 | 0.02990 |
| EPAS1 | 394 | 6707241 | C | −3.33 | 0.03095 |
| EPAS1 | 396 | 7594278 | T | −3.47 | 0.03104 |
| CCDC85A | 421 | 2869529 | C | −3.33 | 0.01914 |
| CTNNA2 | 442 | 6719738 | T | 5.42 | 0.00368 |
| CTNNA2 | 443 | 2566539 | T | 3.67 | 0.02132 |
| CTNNA2 | 444 | 1971766 | A | 4.50 | 0.00543 |
| CTNNA2 | 464 | 318362 | C | 3.50 | 0.02918 |
| LRP1B | 508 | 2171169 | A | 6.96 | 0.00601 |
| LRP1B | 511 | 1949871 | C | 3.23 | 0.03086 |
| LRP1B | 514 | 4954907 | T | 3.73 | 0.04161 |
| KYNU | 525 | 2278587 | A | 5.77 | 0.03983 |
| ARHGAP15 | 538 | 11895997 | A | 4.21 | 0.00457 |
| ARHGAP15 | 559 | 16823114 | A | 4.94 | 0.00164 |
| ARHGAP15 | 560 | 10928200 | T | 5.03 | 0.00232 |
| ARHGAP15 | 561 | 13031917 | C | 5.03 | 0.00232 |
| CACNB4 | 573 | 10497094 | G | 5.55 | 0.01135 |
| PKP4 | 594 | 4664963 | G | −7.01 | 0.03893 |
| SCN9A | 628 | 4447616 | C | 4.22 | 0.00360 |
| SCN9A | 629 | 6732627 | A | 4.07 | 0.00572 |
| CERKL | 631 | 10490688 | T | −3.69 | 0.02450 |
| CERKL | 632 | 895901 | A | −3.69 | 0.02450 |
| CERKL | 634 | 1967351 | C | 3.94 | 0.01038 |
| PARD3B | 657 | 2878473 | C | 3.87 | 0.02264 |
| NRP2 | 672 | 849565 | C | 4.93 | 0.00871 |
| CNTN4 | 761 | 1685456 | C | 3.44 | 0.02879 |
| ARPP-21 | 819 | 3772395 | T | 4.58 | 0.04977 |
| ARPP-21 | 822 | 2305234 | A | 4.58 | 0.04977 |
| ULK4 | 829 | 6763756 | T | 3.89 | 0.00302 |
| ULK4 | 832 | 9827383 | C | 4.75 | 0.00401 |
| ULK4 | 833 | 10510719 | A | 3.83 | 0.01676 |
| ULK4 | 834 | 9311270 | C | 4.11 | 0.00161 |
| ULK4 | 836 | 9311275 | C | 3.61 | 0.00782 |
| ULK4 | 842 | 11129908 | A | 2.77 | 0.03492 |
| FHIT | 918 | 7621056 | A | −3.75 | 0.02014 |
| FHIT | 919 | 11709440 | C | −3.72 | 0.04271 |
| SYNPR | 954 | 1505600 | C | 4.67 | 0.00992 |
| SYNPR | 955 | 4616634 | G | 4.67 | 0.00992 |
| PRICKLE2 | 965 | 696019 | A | 3.12 | 0.04836 |
| EPHA6 | 1004 | 2873617 | G | 6.10 | 0.03693 |
| PLCXD2 | 1010 | 1513331 | C | −6.77 | 0.00092 |
| CDGAP | 1021 | 10934491 | C | −3.51 | 0.03857 |
| CPNE4 | 1049 | 6792146 | A | −4.53 | 0.02011 |
| CPNE4 | 1050 | 16836991 | T | −4.69 | 0.04000 |
| SERPINI2 | 1089 | 17246389 | C | −4.35 | 0.00680 |
| HTR3D | 1128 | 939334 | G | −3.36 | 0.03207 |
| LDB2 | 1172 | 10755217 | G | 3.92 | 0.02075 |
| LDB2 | 1173 | 2135442 | A | 3.14 | 0.04385 |
| LDB2 | 1181 | 1384606 | T | 4.18 | 0.00961 |
| SLIT2 | 1189 | 609535 | A | 2.98 | 0.03598 |
| SLIT2 | 1191 | 9992591 | C | 3.01 | 0.04079 |
| PDLIM5 | 1301 | 951613 | A | −2.88 | 0.04914 |
| COL25A1 | 1317 | 2305438 | A | −4.35 | 0.00204 |
| COL25A1 | 1319 | 13104307 | T | 4.25 | 0.00418 |
| COL25A1 | 1334 | 987695 | G | 3.78 | 0.01371 |
| COL25A1 | 1335 | 7675657 | A | 3.79 | 0.01212 |
| ANK2 | 1344 | 10488904 | A | −3.45 | 0.04253 |
| ANK2 | 1351 | 29306 | G | 3.42 | 0.04294 |
| ANK2 | 1353 | 29311 | A | 3.79 | 0.02417 |
| NDST3 | 1369 | 2291416 | G | 4.80 | 0.02019 |
| NDST3 | 1370 | 2254215 | A | 4.80 | 0.02019 |
| NDST3 | 1372 | 2389498 | T | 4.80 | 0.02019 |
| GPR103 | 1381 | 13110738 | G | −4.32 | 0.01034 |
| MAML3 | 1387 | 2246759 | G | 2.68 | 0.04943 |
| MAML3 | 1388 | 13105452 | T | −2.96 | 0.04884 |
| DCLK2 | 1441 | 12513356 | G | 7.25 | 0.02007 |
| FSTL5 | 1452 | 4501178 | C | −3.91 | 0.03044 |
| FSTL5 | 1457 | 10013537 | T | −3.59 | 0.02595 |
| FSTL5 | 1458 | 1560925 | A | −3.56 | 0.03737 |
| FSTL5 | 1459 | 7679398 | C | −3.18 | 0.04707 |
| PALLD | 1500 | 13122019 | A | −4.08 | 0.00577 |
| PALLD | 1501 | 1039385 | G | −3.76 | 0.01217 |
| ENPP6 | 1520 | 11132220 | A | −3.91 | 0.00434 |
| ENPP6 | 1521 | 6829678 | C | −3.38 | 0.01190 |
| ENPP6 | 1523 | 6831986 | C | −3.32 | 0.01562 |
| ENPP6 | 1524 | 17679120 | A | −3.10 | 0.02310 |
| AHRR | 1530 | 3734145 | T | −4.20 | 0.00618 |
| AHRR | 1531 | 2721004 | T | −3.75 | 0.01586 |
| SEMA5A | 1536 | 17235037 | T | −5.14 | 0.04437 |
| DNAH5 | 1548 | 6862469 | C | −3.26 | 0.04034 |
| DNAH5 | 1549 | 6876673 | T | −3.38 | 0.04722 |
| DNAH5 | 1554 | 1502050 | G | −4.88 | 0.00553 |
| DNAH5 | 1555 | 10513155 | A | 3.55 | 0.01611 |
| DNAH5 | 1563 | 16902955 | G | −3.64 | 0.01359 |
| DNAH5 | 1564 | 16902956 | C | −3.64 | 0.01359 |
| DNAH5 | 1566 | 9312854 | C | −3.64 | 0.01359 |
| CDH10 | 1575 | 3822429 | T | 3.02 | 0.01856 |
| ITGA1 | 1603 | 6883810 | A | −3.09 | 0.04953 |
| ITGA1 | 1606 | 10513001 | G | −3.93 | 0.01402 |
| GPR98 | 1682 | 168743 | G | 3.61 | 0.04407 |
| FBXL17 | 1709 | 2966805 | C | −3.16 | 0.02699 |
| FBXL17 | 1710 | 2922434 | A | −3.16 | 0.02699 |
| FBXL17 | 1715 | 12521975 | T | −2.83 | 0.04529 |
| SNCAIP | 1749 | 7444144 | G | −4.03 | 0.02367 |
| SNCAIP | 1751 | 17149141 | A | −5.25 | 0.00917 |
| ADAMTS19 | 1767 | 30651 | G | 4.12 | 0.01213 |
| ADAMTS19 | 1769 | 4835975 | A | 4.28 | 0.01770 |
| SLC22A23 | 1808 | 7775219 | C | 4.84 | 0.01188 |
| SLC17A4 | 1847 | 4712969 | A | 6.26 | 0.03299 |
| SLC17A4 | 1849 | 4712972 | A | 6.26 | 0.03299 |
| SLC17A4 | 1851 | 1892253 | T | 6.26 | 0.03299 |
| SLC17A1 | 1853 | 1324082 | A | 7.45 | 0.00016 |
| SLC17A1 | 1855 | 13200784 | T | 5.96 | 0.00298 |
| SLC17A3 | 1860 | 1165158 | T | 5.74 | 0.00507 |
| SLC17A2 | 1864 | 13207673 | T | 8.13 | 0.03010 |
| BTN3A1 | 1873 | 10946826 | G | 4.06 | 0.04974 |
| BTNL2 | 1876 | 3806156 | T | 3.92 | 0.01504 |
| BRD2 | 1879 | 194677 | T | 7.97 | 0.03348 |
| ABCC10 | 1885 | 4714684 | C | −3.28 | 0.02282 |
| GABRR2 | 1920 | 6900958 | T | 4.85 | 0.00568 |
| KLHL32 | 1922 | 1766519 | C | 4.36 | 0.04226 |
| SLC22A16 | 1927 | 9320331 | A | −2.98 | 0.03190 |
| SLC22A16 | 1928 | 9481067 | G | −3.15 | 0.02376 |
| TRDN | 1949 | 2317707 | T | 3.44 | 0.04047 |
| NKAIN2 | 1956 | 4897531 | T | −5.56 | 0.00561 |
| PDE7B | 1979 | 9385741 | A | −9.79 | 0.02169 |
| PDE7B | 1981 | 7772608 | G | −9.79 | 0.02169 |
| SYNE1 | 2005 | 2763015 | A | −3.04 | 0.04326 |
| PDE10A | 2058 | 220771 | T | −4.31 | 0.03248 |
| PDE10A | 2065 | 9459474 | C | 3.29 | 0.04340 |
| ETV1 | 2098 | 4721291 | C | −3.57 | 0.00685 |
| SNX13 | 2100 | 2177652 | T | −3.01 | 0.03839 |
| PLEKHA8 | 2135 | 10951257 | G | −5.03 | 0.01445 |
| FLJ22374 | 2145 | 7781249 | A | −3.16 | 0.04856 |
| BMPER | 2166 | 2110856 | C | 3.31 | 0.03886 |
| ABCA13 | 2194 | 17132289 | T | 5.86 | 0.04658 |
| ABCA13 | 2196 | 17548783 | C | 4.09 | 0.00678 |
| ABCA13 | 2198 | 17729647 | G | 4.10 | 0.02276 |
| ABCA13 | 2199 | 7778020 | A | 5.30 | 0.03759 |
| ABCA13 | 2213 | 10216298 | G | 4.48 | 0.04991 |
| WBSCR17 | 2231 | 12538186 | G | −3.31 | 0.02926 |
| WBSCR17 | 2232 | 757841 | C | −3.31 | 0.02926 |
| WBSCR17 | 2234 | 17593300 | G | −3.31 | 0.02926 |
| WBSCR17 | 2235 | 2190223 | C | −3.03 | 0.04859 |
| GTF2IRD1 | 2252 | 2267834 | G | −3.25 | 0.03665 |
| MAGI2 | 2266 | 6466021 | G | 3.05 | 0.04279 |
| MAGI2 | 2281 | 7803949 | A | 3.75 | 0.04130 |
| MAGI2 | 2299 | 2364920 | G | 3.77 | 0.03832 |
| CACNA2D1 | 2308 | 258728 | A | 4.06 | 0.01520 |
| PCLO | 2310 | 10954689 | T | 4.69 | 0.00249 |
| PCLO | 2320 | 9656532 | A | −4.15 | 0.01316 |
| PCLO | 2321 | 2715148 | A | 3.39 | 0.01526 |
| PCLO | 2322 | 2522833 | C | 3.54 | 0.02043 |
| PCLO | 2324 | 2522843 | A | 3.15 | 0.03569 |
| PCLO | 2326 | 1986742 | G | −3.01 | 0.04113 |
| SEMA3E | 2344 | 169992 | C | 3.18 | 0.02776 |
| ABCB4 | 2352 | 31669 | A | −7.80 | 0.00472 |
| PON1 | 2366 | 662 | G | 3.57 | 0.02993 |
| PON1 | 2382 | 2057681 | G | 3.61 | 0.03020 |
| DYNC1I1 | 2390 | 4357216 | C | −7.82 | 0.00017 |
| DYNC1I1 | 2391 | 10243540 | G | −4.51 | 0.02003 |
| DYNC1I1 | 2396 | 42066 | A | −5.13 | 0.03555 |
| KCND2 | 2414 | 7795646 | G | 4.45 | 0.03295 |
| KCND2 | 2416 | 5009999 | T | 7.17 | 0.00030 |
| CNTNAP2 | 2510 | 2717829 | C | −4.67 | 0.04813 |
| PTPRN2 | 2514 | 11771772 | A | 2.76 | 0.04281 |
| PTPRN2 | 2516 | 221242 | A | −7.62 | 0.00810 |
| PTPRN2 | 2523 | 10277112 | A | 4.39 | 0.00576 |
| CSMD1 | 2536 | 2930282 | C | −4.67 | 0.02689 |
| CSMD1 | 2537 | 622765 | A | −4.67 | 0.02689 |
| SGCZ | 2580 | 2898389 | C | −3.13 | 0.03705 |
| SGCZ | 2581 | 7000337 | T | 3.79 | 0.01891 |
| SGCZ | 2582 | 10092634 | C | 4.52 | 0.00250 |
| SGCZ | 2583 | 1551816 | G | 3.71 | 0.02480 |
| SGCZ | 2592 | 17119601 | G | 3.63 | 0.02307 |
| SGCZ | 2595 | 7817295 | A | −3.49 | 0.01689 |
| GFRA2 | 2618 | 17427734 | A | −3.28 | 0.02327 |
| SNTG1 | 2661 | 12545915 | T | −3.21 | 0.04681 |
| NKAIN3 | 2710 | 1383154 | A | 3.65 | 0.02232 |
| CRISPLD1 | 2757 | 1455811 | C | 4.21 | 0.03212 |
| CRISPLD1 | 2758 | 13248650 | G | 3.64 | 0.04136 |
| CRISPLD1 | 2759 | 16939030 | C | −3.63 | 0.04272 |
| MMP16 | 2768 | 10504845 | T | −3.96 | 0.03978 |
| BAALC | 2785 | 1845430 | A | −3.09 | 0.04456 |
| ZFPM2 | 2792 | 12677825 | T | 2.94 | 0.04721 |
| SAMD12 | 2819 | 10955887 | C | −3.37 | 0.02118 |
| SAMD12 | 2820 | 4876841 | A | −3.37 | 0.02118 |
| SAMD12 | 2821 | 10096317 | A | −3.37 | 0.02118 |
| SAMD12 | 2822 | 7830423 | C | −3.37 | 0.02118 |
| DDEF1 | 2860 | 10956511 | T | −3.24 | 0.03378 |
| DDEF1 | 2862 | 12546206 | A | −3.05 | 0.03773 |
| DDEF1 | 2877 | 1123205 | G | −3.70 | 0.01429 |
| ADCY8 | 2889 | 17248206 | G | 4.16 | 0.00473 |
| ADCY8 | 2891 | 7464362 | G | −3.53 | 0.00509 |
| ADCY8 | 2892 | 11781997 | A | −3.21 | 0.01501 |
| ADCY8 | 2893 | 7459573 | G | −2.80 | 0.03771 |
| ADCY8 | 2894 | 4736722 | C | 3.54 | 0.01032 |
| SMARCA2 | 2922 | 16937123 | C | −6.17 | 0.01464 |
| IFT74 | 2985 | 2095405 | C | −4.04 | 0.03292 |
| PIP5K1B | 2999 | 872077 | A | 4.48 | 0.01597 |
| TMC1 | 3030 | 6560293 | A | −2.93 | 0.04807 |
| TMC1 | 3032 | 13285999 | A | −3.63 | 0.01250 |
| TMC1 | 3033 | 10869190 | A | 3.29 | 0.02338 |
| TMC1 | 3042 | 2501914 | T | −2.98 | 0.04993 |
| NTRK2 | 3071 | 11140721 | C | −4.71 | 0.03889 |
| DIRAS2 | 3088 | 7028171 | A | −3.45 | 0.04791 |
| NFIL3 | 3090 | 7869771 | C | 3.78 | 0.01190 |
| GABBR2 | 3102 | 10985811 | C | 4.14 | 0.01432 |
| GABBR2 | 3104 | 13286336 | C | 3.72 | 0.02693 |
| GABBR2 | 3105 | 16914811 | A | 3.68 | 0.03133 |
| ZNF618 | 3131 | 1965753 | T | 3.40 | 0.02344 |
| ZNF618 | 3132 | 10121424 | T | −4.06 | 0.01265 |
| ZNF618 | 3133 | 1408115 | G | 3.40 | 0.02344 |
| CDK5RAP2 | 3140 | 4837782 | T | 5.54 | 0.04600 |
| LHX6 | 3149 | 7849627 | G | −3.07 | 0.04970 |
| ABL1 | 3165 | 2855160 | T | 2.78 | 0.03940 |
| EXOSC2 | 3166 | 4740366 | G | 4.17 | 0.01924 |
| PNPLA7 | 3204 | 10867123 | G | 3.89 | 0.03144 |
| ARHGAP21 | 3253 | 10764482 | G | −4.60 | 0.00968 |
| ARHGAP21 | 3254 | 7070456 | C | −5.75 | 0.00076 |
| ARHGAP21 | 3255 | 10828686 | C | −4.58 | 0.00507 |
| ARHGAP21 | 3256 | 4415644 | T | −4.61 | 0.01621 |
| ARHGAP21 | 3257 | 7897303 | A | −4.61 | 0.01621 |
| MYO3A | 3267 | 993397 | A | −3.33 | 0.02291 |
| MYO3A | 3269 | 17666079 | C | 3.13 | 0.01616 |
| MYO3A | 3280 | 1999240 | C | −2.89 | 0.04492 |
| MYO3A | 3281 | 3758447 | C | 2.96 | 0.02617 |
| JMJD1C | 3296 | 10761739 | C | −5.56 | 0.00016 |
| JMJD1C | 3297 | 10995505 | A | 3.25 | 0.03575 |
| JMJD1C | 3298 | 10740118 | C | −5.56 | 0.00016 |
| JMJD1C | 3300 | 12355784 | A | −4.21 | 0.00317 |
| JMJD1C | 3301 | 9629895 | A | 3.28 | 0.04259 |
| JMJD1C | 3302 | 3999089 | C | −4.22 | 0.00356 |
| NRG3 | 3339 | 17099789 | G | 3.87 | 0.03706 |
| NRG3 | 3346 | 512064 | A | −3.52 | 0.01230 |
| NRG3 | 3347 | 495978 | A | −3.24 | 0.03001 |
| NRG3 | 3353 | 17763320 | A | −5.32 | 0.04684 |
| SORBS1 | 3358 | 11188287 | G | −3.73 | 0.04151 |
| SORBS1 | 3362 | 11188298 | C | 2.87 | 0.04700 |
| ATRNL1 | 3421 | 180675 | A | −4.33 | 0.01804 |
| ATE1 | 3431 | 1693688 | C | −3.07 | 0.03457 |
| ATE1 | 3435 | 1219505 | T | −2.99 | 0.04504 |
| SPON1 | 3501 | 11023054 | A | 3.15 | 0.02514 |
| SPON1 | 3502 | 10832165 | A | 2.89 | 0.03895 |
| SPON1 | 3503 | 7112850 | A | 2.89 | 0.03895 |
| SPON1 | 3504 | 10766134 | G | 2.89 | 0.03895 |
| KCNA4 | 3517 | 7931190 | T | 3.98 | 0.01256 |
| KCNA4 | 3518 | 605765 | G | 3.44 | 0.01298 |
| LOC729025 | 3626 | 1671486 | T | −4.36 | 0.02401 |
| ITPR2 | 3640 | 2230375 | G | −3.52 | 0.03207 |
| CNOT2 | 3644 | 11178116 | C | 6.30 | 0.00528 |
| CNOT2 | 3645 | 7312236 | C | 3.56 | 0.03545 |
| CNOT2 | 3648 | 10506586 | A | −6.01 | 0.03028 |
| CNOT2 | 3650 | 3817486 | G | −6.01 | 0.03028 |
| CNOT2 | 3654 | 1495345 | C | −3.23 | 0.01523 |
| NAV3 | 3678 | 1375287 | C | −3.04 | 0.04760 |
| PLA2G1B | 3687 | 5637 | A | 4.83 | 0.00749 |
| N4BP2L2 | 3700 | 3742318 | C | −3.64 | 0.04574 |
| NBEA | 3722 | 3818423 | C | 4.64 | 0.04656 |
| LMO7 | 3752 | 7986131 | T | 3.01 | 0.04927 |
| SLAIN1 | 3756 | 1279445 | G | 6.48 | 0.01371 |
| SLAIN1 | 3757 | 1279446 | C | 3.81 | 0.02101 |
| GPC5 | 3771 | 553717 | A | −6.18 | 0.00873 |
| GPC5 | 3772 | 342678 | A | −6.02 | 0.01104 |
| GPC5 | 3773 | 342677 | A | −4.13 | 0.04743 |
| GPC5 | 3792 | 17267453 | C | 5.64 | 0.01743 |
| GPC6 | 3803 | 3899317 | A | −3.95 | 0.01952 |
| GPC6 | 3809 | 7987964 | T | −3.70 | 0.01325 |
| LRFN5 | 3895 | 1597045 | T | −3.81 | 0.01313 |
| LRFN5 | 3897 | 4904776 | C | 3.58 | 0.02275 |
| SAMD4A | 3912 | 1212968 | C | −3.87 | 0.03653 |
| RPS6KA5 | 3973 | 941847 | T | 3.22 | 0.04847 |
| RPS6KA5 | 3975 | 1286060 | C | 3.55 | 0.02952 |
| RPS6KA5 | 3978 | 1075014 | C | 3.50 | 0.01889 |
| RPS6KA5 | 3980 | 7492628 | G | 3.63 | 0.01120 |
| BCL11B | 4000 | 2793321 | T | 4.42 | 0.01012 |
| BCL11B | 4001 | 1257446 | C | 5.33 | 0.00168 |
| BCL11B | 4002 | 1257416 | G | 4.49 | 0.01570 |
| C15ORF41 | 4042 | 16964046 | T | 6.14 | 0.03662 |
| C15ORF41 | 4045 | 16964103 | T | 5.94 | 0.04342 |
| C15ORF41 | 4046 | 16964104 | G | 5.94 | 0.04342 |
| C15ORF41 | 4047 | 17508461 | T | 5.94 | 0.04342 |
| RASGRP1 | 4054 | 6492847 | G | 5.25 | 0.00540 |
| CLK3 | 4086 | 11072496 | T | −4.09 | 0.03208 |
| CLK3 | 4087 | 7161903 | G | −4.09 | 0.03208 |
| ARNT2 | 4101 | 4778800 | T | 3.64 | 0.03664 |
| A2BP1 | 4137 | 8054765 | G | 4.12 | 0.01511 |
| CDH13 | 4182 | 1000078 | C | 4.19 | 0.00832 |
| CDH13 | 4183 | 4783266 | A | 3.21 | 0.04507 |
| CDH13 | 4184 | 11646849 | A | 2.86 | 0.03936 |
| CDH13 | 4186 | 4598906 | T | 3.25 | 0.03776 |
| ALOX12B | 4218 | 9914077 | G | −4.28 | 0.00474 |
| CA10 | 4247 | 4635383 | C | 3.15 | 0.04481 |
| CA10 | 4250 | 9303606 | C | −3.34 | 0.02638 |
| CA10 | 4251 | 12945099 | C | −2.91 | 0.03607 |
| DLGAP1 | 4279 | 9948987 | A | −5.08 | 0.00652 |
| ZFP161 | 4281 | 581144 | T | 3.23 | 0.04853 |
| PTPRM | 4291 | 1893224 | C | −7.33 | 0.03051 |
| KIAA0802 | 4307 | 16954483 | C | 4.30 | 0.03846 |
| NEDD4L | 4334 | 9966665 | G | 4.16 | 0.03637 |
| ZNF544 | 4388 | 260454 | T | −2.55 | 0.04837 |
| ATRN | 4392 | 2670314 | A | −3.66 | 0.01608 |
| PRNT | 4396 | 2236284 | G | 4.15 | 0.00569 |
| PRNT | 4397 | 6139537 | T | −4.72 | 0.00574 |
| PRNT | 4400 | 6052824 | A | −3.47 | 0.02246 |
| PRNT | 4402 | 6107527 | G | −3.95 | 0.00329 |
| PRNT | 4407 | 6084876 | T | 3.85 | 0.00683 |
| PLCB1 | 4414 | 6055577 | A | −7.21 | 0.00012 |
| PLCB1 | 4415 | 2235212 | A | −5.36 | 0.00098 |
| PLCB1 | 4417 | 16994533 | G | −4.89 | 0.02509 |
| PLCB1 | 4418 | 6077339 | C | 3.21 | 0.02841 |
| PLCB1 | 4419 | 6055697 | A | 3.21 | 0.02841 |
| MACROD2 | 4454 | 2236008 | T | 3.63 | 0.02258 |
| MACROD2 | 4456 | 11697488 | T | 4.22 | 0.00955 |
| NCAM2 | 4546 | 2826830 | G | −4.76 | 0.00790 |
| NCAM2 | 4547 | 3787603 | G | −4.40 | 0.01385 |
| NCAM2 | 4548 | 2826841 | T | −4.20 | 0.01788 |
| MIRN155 | 4554 | 2828908 | T | 4.72 | 0.02933 |
| PDE9A | 4561 | 2269139 | T | −5.29 | 0.02419 |
| PACSIN2 | 4590 | 2072883 | G | 3.22 | 0.04840 |

TABLE 7
Alleles Influencing Time to Discontinuation for Risperidone

| | | | | Beta | |
|---|---|---|---|---|---|
| Gene | Seq ID | NCBI RS# | Allele | (Months) | P |
| KIF1B | 4 | 912962 | G | 2.65 | 0.02340000 |
| RP1-21O18.1 | 7 | 6663699 | G | 3.33 | 0.01853000 |
| RP1-21O18.1 | 8 | 7518989 | C | 3.97 | 0.04221000 |
| RP1-21O18.1 | 15 | 4501834 | C | 2.90 | 0.03302000 |
| PRKACB | 74 | 2642186 | G | −4.52 | 0.00893200 |
| SYT6 | 78 | 611514 | A | −2.76 | 0.03642000 |
| NGF | 80 | 6327 | A | 3.57 | 0.00304100 |
| NGF | 81 | 12145726 | G | −3.10 | 0.02638000 |
| SEC16B | 128 | 2862300 | G | −3.05 | 0.02147000 |
| RYR2 | 212 | 3766884 | T | 5.09 | 0.00242100 |
| CHRM3 | 227 | 663927 | A | 3.23 | 0.02766000 |
| FMN2 | 232 | 10926147 | G | −2.63 | 0.03394000 |
| PLD5 | 266 | 400904 | T | 2.77 | 0.04121000 |
| C2ORF46 | 276 | 3102945 | C | 3.27 | 0.01632000 |
| C2ORF46 | 279 | 10210006 | C | −2.96 | 0.03525000 |
| KLHL29 | 298 | 7560892 | A | 2.44 | 0.04522000 |
| SLC8A1 | 348 | 389109 | T | 2.98 | 0.03861000 |
| OTX1 | 431 | 11125946 | A | −2.44 | 0.04789000 |
| CTNNA2 | 445 | 2566542 | C | −3.25 | 0.04001000 |
| CTNNA2 | 457 | 2165975 | T | 6.80 | 0.00024050 |
| CTNNA2 | 460 | 160864 | T | 2.92 | 0.00717700 |
| CTNNA2 | 463 | 318369 | G | 2.92 | 0.00935100 |
| CTNNA2 | 465 | 895388 | T | 6.59 | 0.00305500 |
| CTNNA2 | 466 | 1930 | T | 3.67 | 0.01004000 |
| CTNNA2 | 467 | 12464777 | T | 2.70 | 0.04571000 |
| NXPH2 | 499 | 11686876 | T | 3.66 | 0.00602200 |
| LRP1B | 502 | 1486958 | G | 2.17 | 0.04586000 |
| LRP1B | 503 | 1492388 | T | 2.17 | 0.04586000 |
| LRP1B | 507 | 4447563 | G | 2.56 | 0.03286000 |
| KYNU | 527 | 10176234 | A | 2.91 | 0.01925000 |
| FMNL2 | 585 | 11682487 | C | 2.87 | 0.03337000 |
| PKP4 | 599 | 2711066 | C | −3.38 | 0.03270000 |
| SCN3A | 618 | 11677254 | C | 2.99 | 0.01443000 |
| PDE1A | 638 | 2623422 | G | 3.22 | 0.02246000 |
| PDE1A | 641 | 6736414 | T | −2.90 | 0.02767000 |
| ERBB4 | 680 | 1992029 | G | −2.89 | 0.04336000 |
| COL4A3 | 698 | 6741679 | A | 3.61 | 0.00245000 |
| COL4A3 | 701 | 6756898 | C | −3.20 | 0.03855000 |
| CNTN6 | 736 | 11925058 | C | −3.10 | 0.01551000 |
| CNTN6 | 741 | 1353825 | T | 2.59 | 0.04167000 |
| CNTN6 | 742 | 265799 | G | −2.51 | 0.03496000 |
| CNTN6 | 746 | 3772290 | T | −2.52 | 0.03244000 |
| DAZL | 801 | 4685357 | T | −2.92 | 0.01258000 |
| DAZL | 802 | 6787063 | G | −2.58 | 0.02359000 |
| RARB | 806 | 1286738 | T | −3.52 | 0.01698000 |
| RARB | 808 | 1656463 | A | −3.42 | 0.01978000 |
| ERC2 | 896 | 885211 | A | 3.24 | 0.01495000 |
| MAGI1 | 973 | 17073075 | T | 2.85 | 0.03110000 |
| FOXP1 | 984 | 2196356 | C | 3.67 | 0.01155000 |
| FOXP1 | 985 | 2597312 | C | 2.41 | 0.04753000 |
| EPHA6 | 1008 | 6439265 | T | 3.21 | 0.03918000 |
| EPHA6 | 1009 | 2317212 | A | 3.07 | 0.04515000 |
| CPNE4 | 1053 | 13319291 | G | 2.70 | 0.03769000 |
| CPNE4 | 1054 | 9812534 | C | −3.54 | 0.00697100 |
| EPHB1 | 1067 | 936323 | T | 2.37 | 0.03698000 |
| EPHB1 | 1070 | 4894286 | A | −2.48 | 0.04769000 |
| CLSTN2 | 1079 | 9875409 | G | 3.68 | 0.00858000 |
| CLSTN2 | 1080 | 347975 | G | 3.61 | 0.00676700 |
| CLSTN2 | 1081 | 347973 | A | 3.66 | 0.00883400 |
| NLGN1 | 1120 | 12636180 | T | 3.65 | 0.00836300 |
| LEPREL1 | 1139 | 893054 | T | 3.07 | 0.02936000 |
| LEPREL1 | 1140 | 573533 | A | 3.07 | 0.02936000 |
| UBXD7 | 1154 | 7374260 | C | −2.34 | 0.03482000 |
| SLIT2 | 1188 | 10516357 | A | −3.39 | 0.01791000 |
| SLIT2 | 1190 | 2168802 | T | −3.23 | 0.03660000 |
| LPHN3 | 1231 | 995447 | C | 6.10 | 0.02237000 |
| SCD5 | 1268 | 6852540 | C | −2.73 | 0.02726000 |
| FAM13A1 | 1280 | 7657817 | T | −3.41 | 0.03091000 |
| COL25A1 | 1334 | 987695 | G | 3.06 | 0.01774000 |
| COL25A1 | 1337 | 6816017 | G | 3.38 | 0.01769000 |
| COL25A1 | 1338 | 7673867 | A | 3.38 | 0.01769000 |
| MAML3 | 1392 | 10024138 | T | −2.94 | 0.02936000 |
| MAML3 | 1394 | 2271391 | T | −2.92 | 0.03381000 |
| MAML3 | 1396 | 11733737 | T | 2.48 | 0.04880000 |
| MAML3 | 1397 | 17051001 | T | −2.46 | 0.04833000 |
| DCLK2 | 1432 | 4405992 | A | 3.21 | 0.02212000 |
| DCLK2 | 1435 | 12503886 | A | 3.20 | 0.02214000 |
| DCLK2 | 1437 | 10001651 | C | 4.30 | 0.00120900 |
| DCLK2 | 1438 | 11735949 | C | 3.92 | 0.00246700 |
| DCLK2 | 1439 | 17503402 | A | 5.94 | 0.00000006 |
| DCLK2 | 1440 | 11727182 | G | 6.09 | 0.00000015 |
| DCLK2 | 1442 | 6535725 | A | 5.25 | 0.00000354 |
| FSTL5 | 1455 | 6825091 | A | −3.98 | 0.00353700 |
| FSTL5 | 1456 | 7442468 | C | −3.72 | 0.00854400 |
| TLL1 | 1475 | 719753 | G | −4.17 | 0.02645000 |
| TLL1 | 1481 | 1391334 | G | −2.66 | 0.03191000 |
| DNAH5 | 1562 | 13154455 | G | 2.55 | 0.03762000 |
| MYO10 | 1570 | 11750538 | G | 3.76 | 0.00464500 |
| MYO10 | 1571 | 1560089 | T | 4.19 | 0.00092940 |
| MYO10 | 1572 | 890910 | A | 4.06 | 0.00143400 |
| MYO10 | 1573 | 11133860 | G | 3.49 | 0.03594000 |
| EGFLAM | 1587 | 4869576 | T | 5.29 | 0.04848000 |
| ITGA2 | 1617 | 989073 | A | −3.08 | 0.01383000 |
| PDE4D | 1629 | 193447 | T | −3.44 | 0.01478000 |
| VCAN | 1663 | 28296 | A | −3.19 | 0.02343000 |
| VCAN | 1667 | 4558964 | G | −2.81 | 0.03877000 |
| KCNN2 | 1727 | 3857431 | T | −2.53 | 0.04948000 |
| LOC340069 | 1745 | 919306 | C | −2.90 | 0.03084000 |
| LOC340069 | 1746 | 328694 | A | −2.67 | 0.03825000 |
| ODZ2 | 1790 | 13158058 | T | −2.88 | 0.04543000 |
| ODZ2 | 1797 | 7708354 | G | −3.87 | 0.00204100 |
| BTNL2 | 1877 | 3763309 | A | −2.83 | 0.04171000 |
| ELOVL5 | 1889 | 1429146 | T | −2.51 | 0.04782000 |
| ELOVL5 | 1893 | 9357760 | G | −3.32 | 0.01840000 |
| ELOVL5 | 1894 | 9370196 | C | −3.11 | 0.02945000 |
| ELOVL5 | 1895 | 9474507 | A | −4.09 | 0.01209000 |
| ELOVL5 | 1896 | 1429143 | G | −3.50 | 0.02476000 |
| SLC22A16 | 1933 | 2428175 | A | 3.37 | 0.01885000 |
| TRDN | 1937 | 17737379 | T | −3.81 | 0.03039000 |
| EYA4 | 1978 | 6929938 | A | 2.76 | 0.04420000 |
| PARK2 | 2020 | 12055483 | T | 2.74 | 0.03047000 |
| PARK2 | 2021 | 6924602 | C | 2.82 | 0.02018000 |
| CREB5 | 2119 | 2237361 | C | 3.06 | 0.00892500 |
| PLEKHA8 | 2139 | 7806238 | A | −3.85 | 0.04894000 |
| PDE1C | 2152 | 10224888 | T | 2.91 | 0.01164000 |
| PDE1C | 2153 | 3213709 | G | 3.98 | 0.01262000 |
| ABCA13 | 2196 | 17548783 | C | 2.62 | 0.02556000 |
| WBSCR17 | 2230 | 7808758 | C | −2.62 | 0.03618000 |
| WBSCR17 | 2242 | 4585627 | T | 3.41 | 0.01041000 |
| WBSCR17 | 2244 | 12699040 | A | 2.98 | 0.04337000 |
| WBSCR17 | 2246 | 7783170 | C | 3.19 | 0.03021000 |
| HIP1 | 2264 | 11770686 | T | −2.72 | 0.02246000 |
| HIP1 | 2265 | 12533075 | G | −3.14 | 0.01805000 |
| CACNA2D1 | 2306 | 17155665 | T | 5.33 | 0.00732400 |
| SEMA3A | 2347 | 1989964 | T | 2.66 | 0.03028000 |
| ABCB4 | 2349 | 2097937 | G | 3.50 | 0.02621000 |
| ADAM22 | 2361 | 10268574 | T | 4.89 | 0.00466500 |
| PPP1R9A | 2380 | 854542 | G | 2.88 | 0.02997000 |
| DYNC1I1 | 2394 | 2299277 | T | 4.64 | 0.00090580 |
| DYNC1I1 | 2395 | 12672406 | T | −2.95 | 0.02744000 |
| CADPS2 | 2421 | 1476898 | T | −4.91 | 0.00274300 |
| CADPS2 | 2422 | 2471194 | A | −4.91 | 0.00274300 |
| CADPS2 | 2423 | 17144752 | T | −4.31 | 0.00489500 |
| GRM8 | 2441 | 1008907 | T | −2.63 | 0.02952000 |
| GRM8 | 2443 | 2299500 | A | −2.52 | 0.04283000 |
| GRM8 | 2444 | 2299505 | G | 2.83 | 0.01773000 |
| GRM8 | 2447 | 6951643 | G | 2.43 | 0.03151000 |
| GRM8 | 2449 | 6975541 | T | 2.25 | 0.04225000 |
| EXOC4 | 2455 | 7778778 | G | −3.22 | 0.04050000 |
| EXOC4 | 2471 | 4731992 | A | −3.35 | 0.02291000 |
| EXOC4 | 2472 | 6950383 | C | 2.53 | 0.02763000 |
| DGKI | 2474 | 1731951 | T | 3.28 | 0.00756500 |
| CNTNAP2 | 2489 | 1948489 | T | −3.44 | 0.03683000 |
| CNTNAP2 | 2493 | 1405179 | C | −3.56 | 0.00672800 |
| CNTNAP2 | 2494 | 12535047 | T | −3.43 | 0.01179000 |
| CNTNAP2 | 2510 | 2717829 | C | −4.38 | 0.01829000 |
| PTPRN2 | 2512 | 221258 | C | −3.35 | 0.01476000 |
| PTPRN2 | 2513 | 221300 | C | −2.85 | 0.03487000 |
| SLC7A2 | 2600 | 2285295 | G | −8.29 | 0.01167000 |
| PSD3 | 2604 | 13260536 | G | −2.81 | 0.01525000 |
| PSD3 | 2605 | 1038606 | G | −2.98 | 0.01539000 |
| SNTG1 | 2660 | 12548940 | C | −3.22 | 0.03371000 |
| NKAIN3 | 2704 | 4737609 | A | −4.14 | 0.00871100 |
| NKAIN3 | 2706 | 4739003 | A | −4.54 | 0.01948000 |
| NKAIN3 | 2707 | 16929516 | T | −4.54 | 0.01948000 |
| NKAIN3 | 2708 | 16929568 | A | −4.54 | 0.01948000 |
| NKAIN3 | 2723 | 10957263 | C | −3.69 | 0.02326000 |
| DEPDC2 | 2734 | 10808759 | C | 3.22 | 0.01531000 |
| ZFPM2 | 2790 | 7845734 | G | 3.12 | 0.04689000 |
| CSMD3 | 2815 | 4354335 | G | 3.50 | 0.02607000 |
| CSMD3 | 2816 | 1513524 | C | 3.25 | 0.03740000 |
| CSMD3 | 2817 | 2954892 | G | 3.20 | 0.03834000 |
| SAMD12 | 2825 | 1607924 | G | 2.85 | 0.03947000 |
| SAMD12 | 2826 | 10505340 | A | 3.96 | 0.03913000 |
| DDEF1 | 2869 | 11774947 | A | 2.62 | 0.03014000 |
| ADCY8 | 2884 | 3793387 | T | −2.74 | 0.02021000 |
| ADCY8 | 2885 | 4339660 | G | −2.74 | 0.02021000 |
| ADCY8 | 2886 | 10956553 | G | −2.74 | 0.02021000 |
| ADCY8 | 2890 | 7016933 | A | −2.75 | 0.03555000 |
| ST3GAL1 | 2904 | 2945779 | A | −2.71 | 0.01933000 |
| SMARCA2 | 2931 | 2147263 | T | 2.36 | 0.04745000 |
| SMARCA2 | 2932 | 4741650 | T | −2.77 | 0.03500000 |
| PTPRD | 2944 | 7036240 | A | −2.49 | 0.03516000 |
| ADAMTSL1 | 2958 | 563805 | C | −3.71 | 0.02012000 |
| TRPM3 | 3025 | 2993010 | A | −3.11 | 0.01876000 |
| TRPM6 | 3047 | 1012710 | C | 2.72 | 0.03664000 |
| SHC3 | 3085 | 9410299 | G | 3.81 | 0.00244200 |
| SVEP1 | 3127 | 7875389 | C | −2.44 | 0.02914000 |
| STOM | 3142 | 2196311 | G | 3.53 | 0.03063000 |
| NTNG2 | 3173 | 883318 | G | 2.92 | 0.00982200 |
| NTNG2 | 3175 | 11793404 | T | 3.51 | 0.00590600 |
| NTNG2 | 3176 | 3739930 | A | 4.69 | 0.01391000 |
| NTNG2 | 3177 | 3739929 | G | 3.93 | 0.03744000 |
| NTNG2 | 3178 | 7026497 | A | 3.30 | 0.00725800 |
| VAV2 | 3191 | 2519799 | G | 2.40 | 0.03307000 |
| VAV2 | 3192 | 2073829 | G | 2.48 | 0.01996000 |
| NOTCH1 | 3200 | 10870085 | T | 3.06 | 0.03949000 |
| NPDC1 | 3202 | 4880195 | C | −3.54 | 0.01601000 |
| GRIN1 | 3203 | 7856589 | A | 3.98 | 0.00724500 |
| CACNB2 | 3235 | 16917281 | G | −3.05 | 0.04812000 |
| CACNB2 | 3236 | 10828679 | G | −5.17 | 0.00414500 |
| CACNB2 | 3237 | 10764483 | A | −4.26 | 0.03404000 |
| CDH23 | 3314 | 4747197 | T | −3.32 | 0.02496000 |
| CDH23 | 3315 | 2070968 | A | −3.18 | 0.03747000 |
| NRG3 | 3340 | 1937959 | G | 3.69 | 0.04772000 |
| SORBS1 | 3365 | 17456435 | C | 3.83 | 0.02197000 |
| VTI1A | 3391 | 3740143 | G | 3.37 | 0.00990100 |
| VTI1A | 3392 | 716168 | C | 3.63 | 0.00395900 |
| VTI1A | 3393 | 10509963 | A | 3.58 | 0.00434700 |
| VTI1A | 3394 | 10885352 | T | 3.46 | 0.00581100 |
| C11ORF49 | 3520 | 11039112 | T | 2.71 | 0.04288000 |
| DLG2 | 3529 | 12275254 | C | −2.32 | 0.04812000 |
| DLG2 | 3541 | 1943695 | T | 3.69 | 0.01248000 |
| DLG2 | 3552 | 1940128 | C | 4.46 | 0.00891200 |
| DLG2 | 3554 | 582652 | A | 4.10 | 0.02499000 |
| OPCML | 3561 | 882584 | A | −3.34 | 0.01873000 |
| OPCML | 3562 | 7120180 | G | −3.36 | 0.02284000 |
| OPCML | 3563 | 12284699 | A | −3.21 | 0.02482000 |
| OPCML | 3564 | 10791230 | G | −2.85 | 0.03642000 |
| OPCML | 3565 | 4937700 | T | −2.43 | 0.04986000 |
| TSPAN9 | 3592 | 4766079 | C | −3.33 | 0.01468000 |
| STYK1 | 3610 | 1979268 | T | 2.67 | 0.03062000 |
| CNOT2 | 3642 | 10879096 | G | −4.21 | 0.01091000 |
| CNOT2 | 3646 | 17107924 | T | −4.73 | 0.01533000 |
| KCNC2 | 3656 | 4131955 | T | −3.44 | 0.01155000 |
| KCNC2 | 3657 | 7952767 | C | −3.33 | 0.01928000 |
| KCNC2 | 3658 | 1526821 | C | −3.44 | 0.01155000 |
| NAV3 | 3665 | 1677923 | G | −4.36 | 0.03007000 |
| GAS2L3 | 3680 | 35711 | G | 3.71 | 0.00138100 |
| GAS2L3 | 3681 | 35706 | A | 3.34 | 0.00359800 |
| NBEA | 3716 | 1381479 | C | 3.95 | 0.02518000 |
| GPC5 | 3788 | 7997883 | G | 3.22 | 0.01511000 |
| GPC5 | 3792 | 17267453 | C | −5.90 | 0.00952600 |
| GPC6 | 3796 | 9516222 | G | 4.40 | 0.00968200 |
| GPC6 | 3799 | 1323974 | C | 3.69 | 0.01787000 |
| NPAS3 | 3870 | 1315139 | T | 3.82 | 0.00383200 |
| LRFN5 | 3902 | 10131436 | A | 3.35 | 0.01160000 |
| SAMD4A | 3910 | 11626634 | A | 4.01 | 0.03693000 |
| RGS6 | 3939 | 1568404 | T | 2.76 | 0.01410000 |
| RGS6 | 3940 | 847358 | A | −2.97 | 0.00824600 |
| RGS6 | 3945 | 2681754 | A | −2.56 | 0.03572000 |
| RGS6 | 3947 | 10136263 | T | −3.02 | 0.02383000 |
| RGS6 | 3949 | 10149207 | G | −2.73 | 0.03271000 |
| RGS6 | 3950 | 2239221 | C | −3.62 | 0.00400400 |
| RGS6 | 3952 | 2238192 | A | −2.56 | 0.04299000 |
| RASGRP1 | 4051 | 12324402 | G | 2.79 | 0.02325000 |
| CDH13 | 4184 | 11646849 | A | −3.00 | 0.01034000 |
| CDH13 | 4187 | 192598 | A | 2.59 | 0.03428000 |
| CDH13 | 4188 | 7201088 | G | 2.74 | 0.02699000 |
| CDH13 | 4189 | 9933935 | T | 2.55 | 0.04489000 |
| CRISPLD2 | 4213 | 16974822 | G | 4.82 | 0.00014050 |
| CRISPLD2 | 4214 | 2934477 | A | −2.63 | 0.03089000 |
| CRISPLD2 | 4215 | 8049317 | G | −3.04 | 0.01094000 |
| CRISPLD2 | 4216 | 2646107 | C | 3.85 | 0.00145500 |
| CA10 | 4249 | 8069850 | A | 2.50 | 0.04822000 |
| MSI2 | 4257 | 8066677 | G | 2.80 | 0.02093000 |
| PTPRM | 4288 | 535937 | A | 4.44 | 0.01262000 |
| PTPRM | 4289 | 524833 | C | 3.62 | 0.02496000 |
| PTPRM | 4291 | 1893224 | C | 3.98 | 0.02152000 |
| PTPRM | 4292 | 1893223 | C | 3.65 | 0.02243000 |
| NEDD4L | 4333 | 12373325 | T | 3.15 | 0.03253000 |
| DOK6 | 4377 | 12967871 | A | −2.57 | 0.03545000 |
| ZNF667 | 4387 | 10423617 | T | 3.65 | 0.02665000 |
| MACROD2 | 4452 | 6043402 | A | −6.49 | 0.02172000 |
| MACROD2 | 4459 | 1225890 | C | 2.83 | 0.04854000 |
| PTPRT | 4511 | 2223540 | T | 3.40 | 0.01583000 |
| PTGIS | 4523 | 515633 | A | −6.58 | 0.01351000 |
| CDH4 | 4534 | 2427144 | A | −3.20 | 0.01535000 |
| NCAM2 | 4544 | 9978969 | T | 5.05 | 0.00126100 |
| PCP4 | 4558 | 16998864 | A | 5.20 | 0.01318000 |
| PCP4 | 4559 | 2837283 | T | 4.41 | 0.03250000 |
| ASPHD2 | 4573 | 16982107 | T | −6.38 | 0.02428000 |
| EFCAB6 | 4598 | 9614382 | G | −2.97 | 0.02951000 |
| EFCAB6 | 4606 | 5764214 | C | −2.94 | 0.01969000 |

TABLE 8
Alleles Influencing Time to Discontinuation for Quetiapine

| | | | | Beta | |
|---|---|---|---|---|---|
| Gene | Seq ID | NCBI RS# | Allele | (Months) | P |
| LRP8 | 57 | 1288519 | C | 2.99 | 0.015790 |
| LRP8 | 58 | 1416096 | A | 2.49 | 0.041320 |
| LRP8 | 60 | 2782497 | C | 2.49 | 0.041320 |
| PTGFRN | 87 | 2251406 | G | −6.30 | 0.039310 |
| PTGFRN | 88 | 2250457 | G | −6.06 | 0.048080 |
| PTGFRN | 89 | 2806864 | G | −6.06 | 0.048080 |
| PTGFRN | 94 | 12090536 | G | 3.62 | 0.009760 |
| KCNN3 | 97 | 11264248 | C | 2.58 | 0.031130 |
| FAM78B | 113 | 10800181 | G | −2.51 | 0.036160 |
| RYR2 | 208 | 2169902 | A | 4.98 | 0.049730 |
| CHRM3 | 221 | 6663632 | A | 2.60 | 0.031420 |
| RGS7 | 257 | 4659585 | A | −3.25 | 0.012550 |
| PLD5 | 262 | 2252440 | T | 2.76 | 0.021420 |
| PLD5 | 263 | 10926660 | C | 2.94 | 0.040370 |
| PLD5 | 264 | 4658772 | G | 2.81 | 0.045860 |
| PLD5 | 265 | 10926665 | A | 2.81 | 0.045860 |
| C2ORF46 | 273 | 7577544 | G | 5.38 | 0.027520 |
| BRE | 322 | 10209422 | T | −3.26 | 0.035550 |
| PRKCE | 390 | 281473 | A | 4.72 | 0.037500 |
| FBXO11 | 398 | 874869 | C | 3.48 | 0.003725 |
| FBXO11 | 399 | 12463595 | T | 3.51 | 0.012290 |
| CTNNA2 | 458 | 6547299 | A | 2.65 | 0.032160 |
| NAP5 | 483 | 12991216 | A | −3.06 | 0.009380 |
| NAP5 | 487 | 11695364 | T | 3.66 | 0.002984 |
| NXPH2 | 499 | 11686876 | T | 2.32 | 0.044570 |
| LRP1B | 512 | 10188773 | G | −3.16 | 0.005816 |
| ARHGAP15 | 540 | 10496944 | A | 3.54 | 0.023370 |
| ARHGAP15 | 557 | 11693600 | C | −2.59 | 0.039310 |
| CACNB4 | 565 | 2345160 | G | −6.78 | 0.001175 |
| CACNB4 | 567 | 13421383 | T | 4.59 | 0.002738 |
| CACNB4 | 569 | 12693235 | C | 3.79 | 0.009396 |
| CACNB4 | 570 | 1806702 | G | 5.39 | 0.000368 |
| CACNB4 | 572 | 17326195 | T | 5.44 | 0.000998 |
| FMNL2 | 574 | 2164402 | G | 5.02 | 0.000140 |
| FMNL2 | 575 | 6434028 | C | 3.42 | 0.003645 |
| FMNL2 | 576 | 11684450 | G | 3.83 | 0.003748 |
| FMNL2 | 577 | 12471183 | T | 4.46 | 0.000252 |
| FMNL2 | 578 | 17327752 | A | 2.72 | 0.045250 |
| FMNL2 | 580 | 2577180 | G | −3.10 | 0.040890 |
| FMNL2 | 581 | 10497108 | C | 5.57 | 0.002176 |
| FMNL2 | 582 | 16823807 | G | 5.57 | 0.002176 |
| FMNL2 | 583 | 16823809 | C | 4.97 | 0.005751 |
| FMNL2 | 584 | 10497111 | A | 5.42 | 0.005860 |
| PLA2R1 | 604 | 949753 | G | −3.60 | 0.036320 |
| PLA2R1 | 611 | 17241282 | C | 2.50 | 0.032790 |
| SCN3A | 617 | 1439807 | G | 2.94 | 0.035790 |
| PDE1A | 636 | 3769789 | G | 3.23 | 0.042350 |
| ALS2 | 654 | 4675226 | T | 3.32 | 0.013680 |
| PARD3B | 666 | 698906 | T | 3.78 | 0.028000 |
| PIP5K3 | 676 | 920218 | A | 6.52 | 0.022000 |
| PIP5K3 | 677 | 10497899 | T | 6.52 | 0.022000 |
| COL4A4 | 695 | 10166736 | A | −4.64 | 0.000053 |
| COL4A4 | 696 | 2272202 | C | −3.15 | 0.010140 |
| CNTN6 | 737 | 3772339 | T | 2.67 | 0.025420 |
| CNTN6 | 751 | 2291100 | C | −2.61 | 0.042380 |
| CNTN6 | 753 | 17038510 | T | 3.17 | 0.040590 |
| IRAK2 | 785 | 708035 | T | −2.93 | 0.006203 |
| IRAK2 | 786 | 11717636 | C | −2.92 | 0.007807 |
| SLC6A6 | 797 | 2241780 | C | 3.33 | 0.038100 |
| ARPP-21 | 821 | 4678802 | C | 2.75 | 0.020300 |
| ERC2 | 884 | 11707255 | A | −2.78 | 0.035190 |
| ERC2 | 885 | 11713228 | C | −2.62 | 0.047500 |
| PTPRG | 936 | 6785764 | G | −3.45 | 0.045750 |
| PRICKLE2 | 957 | 17069879 | A | 3.56 | 0.030630 |
| PRICKLE2 | 959 | 17664296 | T | −3.22 | 0.007006 |
| PRICKLE2 | 961 | 13068250 | C | −3.13 | 0.010680 |
| GBE1 | 992 | 3772899 | G | 2.37 | 0.048300 |
| GBE1 | 995 | 3772891 | A | −2.92 | 0.031570 |
| EPHA6 | 1009 | 2317212 | A | 3.51 | 0.043670 |
| PLCXD2 | 1016 | 9288930 | T | 2.56 | 0.037560 |
| KALRN | 1045 | 16835902 | C | 2.37 | 0.032410 |
| ZXDC | 1047 | 1687462 | C | 2.56 | 0.045120 |
| CLSTN2 | 1077 | 4683509 | G | −2.69 | 0.046860 |
| SPSB4 | 1083 | 7651293 | T | 9.76 | 0.020290 |
| TNIK | 1102 | 17217552 | G | −7.02 | 0.034640 |
| PLD1 | 1108 | 4243419 | G | −3.46 | 0.031100 |
| PLD1 | 1109 | 2178532 | A | −3.39 | 0.032730 |
| NLGN1 | 1113 | 16828952 | A | −2.57 | 0.019490 |
| NLGN1 | 1114 | 9870677 | C | −2.57 | 0.030240 |
| NLGN1 | 1115 | 993298 | C | −2.42 | 0.039420 |
| NEGN1 | 1117 | 9874225 | G | −3.20 | 0.013690 |
| NLGN1 | 1118 | 9878812 | C | −4.01 | 0.027250 |
| LEPREL1 | 1136 | 17424551 | G | 2.67 | 0.046710 |
| LEPREL1 | 1137 | 692909 | T | −2.78 | 0.048120 |
| LEPREL1 | 1138 | 2667709 | G | −2.78 | 0.048120 |
| LEPREL1 | 1140 | 573533 | A | −2.78 | 0.048120 |
| LDB2 | 1170 | 9993371 | T | 2.66 | 0.019920 |
| LDB2 | 1171 | 7690190 | A | 2.38 | 0.034790 |
| LDB2 | 1174 | 283027 | T | −6.80 | 0.026000 |
| PPARGC1A | 1194 | 2290604 | G | −4.85 | 0.047300 |
| LIMCH1 | 1227 | 17444879 | T | −4.57 | 0.009328 |
| LIMCH1 | 1228 | 6850846 | A | −2.80 | 0.038240 |
| SCD5 | 1265 | 6811012 | T | −3.95 | 0.023890 |
| FAM13A1 | 1285 | 17817631 | T | 3.42 | 0.049890 |
| PDLIM5 | 1290 | 2438142 | A | −3.06 | 0.012230 |
| PDLIM5 | 1291 | 1353044 | T | −2.93 | 0.016380 |
| PDLIM5 | 1292 | 2433325 | A | −2.93 | 0.016380 |
| DKK2 | 1304 | 419764 | T | 3.47 | 0.014350 |
| DKK2 | 1305 | 399087 | C | 3.29 | 0.039250 |
| COL25A1 | 1332 | 2526456 | G | −2.96 | 0.025690 |
| COL25A1 | 1333 | 2704102 | C | −2.85 | 0.032310 |
| INPP4B | 1421 | 17015779 | C | 3.04 | 0.046570 |
| ENPP6 | 1521 | 6829678 | C | 2.84 | 0.008260 |
| ENPP6 | 1522 | 7696176 | C | 3.00 | 0.005635 |
| ENPP6 | 1524 | 17679120 | A | 2.77 | 0.012380 |
| ENPP6 | 1525 | 4444870 | T | −3.02 | 0.007302 |
| ENPP6 | 1526 | 11132224 | C | 2.90 | 0.012170 |
| SEMA5A | 1542 | 4702625 | G | 4.02 | 0.019640 |
| SEMA5A | 1543 | 12520210 | A | 2.76 | 0.035120 |
| SEMA5A | 1544 | 13174956 | T | 2.74 | 0.036440 |
| ITGA1 | 1607 | 2169782 | T | −3.85 | 0.025750 |
| PDE4D | 1628 | 35274 | G | 2.89 | 0.019050 |
| PDE4D | 1629 | 193447 | T | 4.22 | 0.004303 |
| PDE4D | 1630 | 165940 | T | 3.12 | 0.021810 |
| VCAN | 1668 | 2287926 | A | −3.46 | 0.035700 |
| VCAN | 1671 | 2445874 | T | −3.76 | 0.023730 |
| VCAN | 1672 | 3096172 | C | −2.83 | 0.038250 |
| CAST | 1695 | 731827 | T | 2.55 | 0.032430 |
| CAST | 1696 | 17401719 | C | 2.40 | 0.044380 |
| WWC1 | 1800 | 6555802 | A | −2.76 | 0.044570 |
| SLC22A23 | 1813 | 9392497 | T | −6.80 | 0.040850 |
| SLC17A1 | 1855 | 13200784 | T | −3.56 | 0.010700 |
| SLC17A3 | 1858 | 1165162 | A | −3.87 | 0.003778 |
| SLC17A3 | 1859 | 1165161 | A | −3.69 | 0.005748 |
| SLC17A3 | 1860 | 1165158 | T | −3.64 | 0.009834 |
| LRFN2 | 1880 | 1433721 | G | 2.82 | 0.032090 |
| ELOVL5 | 1888 | 2562898 | A | −2.97 | 0.042410 |
| RIMS1 | 1914 | 9446625 | T | −3.04 | 0.010870 |
| RIMS1 | 1915 | 2815743 | T | −2.60 | 0.026540 |
| RIMS1 | 1916 | 7738055 | C | −2.99 | 0.013230 |
| SYNE1 | 2008 | 7776230 | T | −3.88 | 0.003824 |
| PARK2 | 2033 | 4708953 | C | −3.17 | 0.018980 |
| PARK2 | 2034 | 6930880 | C | −2.81 | 0.029210 |
| PARK2 | 2040 | 9365421 | A | −2.57 | 0.037820 |
| PACRG | 2050 | 7740626 | G | −3.31 | 0.010930 |
| PDE10A | 2059 | 9459418 | A | −2.72 | 0.045300 |
| CREB5 | 2125 | 4722864 | A | 2.94 | 0.049710 |
| CRHR2 | 2140 | 975537 | A | −4.04 | 0.009416 |
| CRHR2 | 2141 | 973002 | G | −3.90 | 0.018480 |
| PDE1C | 2158 | 30568 | C | 4.00 | 0.017390 |
| PDE1C | 2160 | 4551232 | A | 3.05 | 0.009675 |
| PDE1C | 2161 | 10225488 | A | 2.93 | 0.013060 |
| PDE1C | 2162 | 2079373 | C | 5.72 | 0.000135 |
| VPS41 | 2179 | 2286080 | G | 2.66 | 0.032950 |
| ABCA13 | 2194 | 17132289 | T | −4.82 | 0.034590 |
| ABCA13 | 2214 | 6958356 | A | 2.68 | 0.023710 |
| MAGI2 | 2279 | 848913 | C | 3.77 | 0.038580 |
| MAGI2 | 2294 | 860246 | A | 3.44 | 0.010730 |
| CACNA2D1 | 2304 | 17262683 | C | 2.93 | 0.034100 |
| ABCB4 | 2354 | 2888611 | C | −3.65 | 0.038890 |
| EMID2 | 2402 | 6947185 | C | 2.65 | 0.039810 |
| CUX1 | 2410 | 712839 | A | 2.72 | 0.044540 |
| DGKI | 2474 | 1731951 | T | −2.34 | 0.044930 |
| CREB3L2 | 2481 | 11972734 | A | 2.86 | 0.024020 |
| CNTNAP2 | 2490 | 6963627 | T | 2.61 | 0.022370 |
| CNTNAP2 | 2491 | 1639484 | T | 2.27 | 0.039910 |
| CNTNAP2 | 2497 | 12703906 | T | −2.84 | 0.026380 |
| CNTNAP2 | 2502 | 2022226 | C | 2.70 | 0.037400 |
| PTPRN2 | 2517 | 4716882 | T | 2.47 | 0.044150 |
| PTPRN2 | 2520 | 2335167 | C | 3.44 | 0.001937 |
| PTPRN2 | 2531 | 4909222 | G | 3.33 | 0.004042 |
| MCPH1 | 2551 | 1530408 | C | −4.05 | 0.031370 |
| DLC1 | 2578 | 536147 | G | 3.57 | 0.047570 |
| SGCZ | 2587 | 7813614 | T | 2.67 | 0.036620 |
| SGCZ | 2592 | 17119601 | G | 3.42 | 0.009225 |
| SGCZ | 2593 | 11990657 | T | −2.88 | 0.034220 |
| TOX | 2685 | 11777927 | A | 3.34 | 0.035790 |
| KCNB2 | 2745 | 2196904 | C | 2.81 | 0.043680 |
| KCNB2 | 2746 | 2255053 | A | −4.29 | 0.028690 |
| KCNB2 | 2750 | 2053421 | G | 2.80 | 0.028860 |
| GRHL2 | 2773 | 4734553 | G | −3.15 | 0.015480 |
| GRHL2 | 2775 | 13275653 | C | −2.64 | 0.044440 |
| CSMD3 | 2810 | 17640721 | C | 3.26 | 0.029800 |
| CSMD3 | 2812 | 11996690 | A | 5.85 | 0.030080 |
| ADCY8 | 2887 | 12548835 | T | −2.65 | 0.040850 |
| COL22A1 | 2918 | 1316335 | A | −3.79 | 0.008787 |
| COL22A1 | 2919 | 9657434 | T | −3.78 | 0.009091 |
| SMARCA2 | 2931 | 2147263 | T | 3.91 | 0.002293 |
| SLC1A1 | 2938 | 3087879 | C | −2.51 | 0.034470 |
| PTPRD | 2939 | 3858060 | T | −2.83 | 0.043940 |
| IFT74 | 2982 | 17694549 | C | 5.94 | 0.010800 |
| IFT74 | 2983 | 3429 | A | 3.89 | 0.022060 |
| IFT74 | 2985 | 2095405 | C | 4.01 | 0.011780 |
| TEK | 2990 | 1322051 | A | 6.03 | 0.014760 |
| TRPM3 | 3023 | 718447 | A | 2.92 | 0.030650 |
| TMC1 | 3028 | 7857300 | T | −2.77 | 0.024030 |
| TMC1 | 3029 | 7866185 | T | −2.40 | 0.046170 |
| NTRK2 | 3076 | 13289538 | G | 4.89 | 0.039800 |
| NFIL3 | 3092 | 7038686 | A | −4.58 | 0.001379 |
| NFIL3 | 3093 | 4743835 | A | −3.96 | 0.002948 |
| NFIL3 | 3094 | 4743836 | T | −3.96 | 0.009878 |
| NFIL3 | 3096 | 4743838 | A | −3.92 | 0.010470 |
| ZNF169 | 3097 | 12236219 | T | −5.74 | 0.032780 |
| RP11-35N6.1 | 3108 | 7853653 | A | −3.01 | 0.041430 |
| FKTN | 3112 | 885954 | C | −2.95 | 0.014930 |
| FKTN | 3113 | 17251166 | C | −2.62 | 0.039910 |
| FKTN | 3114 | 7851777 | T | −2.62 | 0.039910 |
| CDK5RAP2 | 3135 | 4836819 | A | 2.34 | 0.033730 |
| SLC25A25 | 3162 | 9695803 | C | 3.47 | 0.043050 |
| ABL1 | 3172 | 10901297 | A | −5.46 | 0.033810 |
| VAV2 | 3184 | 10993826 | T | −2.93 | 0.042390 |
| CACNA1B | 3209 | 7860423 | A | 3.28 | 0.039010 |
| CACNA1B | 3212 | 10867105 | C | 3.74 | 0.027430 |
| PITRM1 | 3224 | 2129440 | G | 3.37 | 0.004872 |
| PITRM1 | 3225 | 6601755 | C | 3.06 | 0.012500 |
| MYO3A | 3272 | 11014933 | A | 2.40 | 0.040000 |
| MYO3A | 3282 | 6482535 | C | 4.86 | 0.005334 |
| MYO3A | 3287 | 3781117 | C | 3.76 | 0.042520 |
| SLC16A9 | 3293 | 10993988 | T | −2.70 | 0.039340 |
| KCNMA1 | 3323 | 3781158 | T | −2.66 | 0.038640 |
| KCNMA1 | 3324 | 2131216 | T | −2.64 | 0.039310 |
| NRG3 | 3345 | 474496 | G | −2.51 | 0.028110 |
| NRG3 | 3350 | 11812533 | T | 9.92 | 0.002431 |
| NRG3 | 3351 | 17101125 | A | 9.70 | 0.007997 |
| NRG3 | 3352 | 10509462 | T | 9.70 | 0.007997 |
| NRG3 | 3353 | 17763320 | A | 5.71 | 0.045740 |
| SORCS3 | 3372 | 10786808 | T | 3.41 | 0.048340 |
| SORCS3 | 3378 | 7099674 | A | 3.35 | 0.022300 |
| SORCS3 | 3383 | 2692331 | G | 3.11 | 0.035640 |
| HSPA12A | 3424 | 12777585 | C | 2.33 | 0.040560 |
| HSPA12A | 3425 | 1900500 | A | −2.71 | 0.018550 |
| HSPA12A | 3426 | 3010476 | G | −2.53 | 0.030490 |
| HSPA12A | 3428 | 1622217 | C | −2.29 | 0.047440 |
| GALNTL4 | 3468 | 4910288 | A | −2.65 | 0.045940 |
| GALNTL4 | 3469 | 4910289 | C | −3.20 | 0.027850 |
| ARNTL | 3482 | 7107711 | C | 3.16 | 0.049040 |
| ARNTL | 3483 | 7112233 | T | 3.16 | 0.049040 |
| DLG2 | 3542 | 11234157 | T | −2.49 | 0.027170 |
| DLG2 | 3544 | 1943696 | C | −2.52 | 0.025200 |
| DLG2 | 3545 | 1943698 | G | −2.45 | 0.030540 |
| DLG2 | 3546 | 11234194 | C | −2.41 | 0.030760 |
| TSPAN9 | 3591 | 10848789 | A | −3.40 | 0.019300 |
| TSPAN9 | 3593 | 544668 | G | −2.92 | 0.025560 |
| TMEM16B | 3604 | 7298357 | A | 2.76 | 0.027500 |
| PIK3C2G | 3632 | 7136674 | G | 3.28 | 0.016110 |
| CHST11 | 3683 | 2141857 | T | 2.94 | 0.046000 |
| CHST11 | 3684 | 2055861 | C | 2.74 | 0.021310 |
| NBEA | 3719 | 7320580 | G | −3.32 | 0.026280 |
| NBEA | 3723 | 17769661 | T | −4.29 | 0.019870 |
| FNDC3A | 3734 | 7321178 | G | −3.47 | 0.005594 |
| LMO7 | 3741 | 502171 | G | −2.99 | 0.011840 |
| SLAIN1 | 3754 | 9530678 | A | 4.05 | 0.009498 |
| SLAIN1 | 3755 | 1343911 | A | 3.28 | 0.038850 |
| SLAIN1 | 3757 | 1279446 | C | 2.85 | 0.022380 |
| GPC5 | 3761 | 7992120 | T | −3.69 | 0.039590 |
| NALCN | 3836 | 9300662 | G | 2.35 | 0.042360 |
| ITGBL1 | 3851 | 1469855 | G | 5.12 | 0.024900 |
| ITGBL1 | 3852 | 1469853 | G | 3.96 | 0.039950 |
| WDR23 | 3853 | 3742499 | T | −6.86 | 0.024560 |
| GNG2 | 3909 | 12882906 | G | 2.64 | 0.026700 |
| PPP2R5E | 3925 | 8008684 | G | 4.04 | 0.008795 |
| PPP2R5E | 3926 | 2754223 | G | 3.45 | 0.009768 |
| PPP2R5E | 3928 | 1255741 | A | 2.51 | 0.049010 |
| RGS6 | 3950 | 2239221 | C | 2.34 | 0.041930 |
| NRXN3 | 3957 | 759233 | G | −6.25 | 0.005320 |
| NRXN3 | 3958 | 8011654 | C | −4.84 | 0.027210 |
| KCNK13 | 3967 | 3850395 | C | 2.63 | 0.032570 |
| CCDC88C | 3987 | 11160006 | C | 2.40 | 0.047130 |
| RYR3 | 4027 | 937302 | G | 2.47 | 0.035410 |
| RYR3 | 4028 | 16957065 | G | 2.44 | 0.047940 |
| KIAA1370 | 4064 | 4776065 | C | 3.03 | 0.010740 |
| KIAA1370 | 4066 | 1863512 | G | 2.93 | 0.013390 |
| CGNL1 | 4071 | 4774941 | G | 5.44 | 0.006506 |
| TBC1D2B | 4088 | 1108478 | C | 3.02 | 0.035190 |
| TBC1D2B | 4094 | 12593545 | G | 2.92 | 0.044670 |
| TBC1D2B | 4095 | 2867985 | A | 3.08 | 0.015030 |
| TBC1D2B | 4098 | 12903461 | T | −3.20 | 0.031500 |
| ARNT2 | 4102 | 4778835 | G | 3.49 | 0.023440 |
| A2BP1 | 4118 | 1155959 | C | −2.43 | 0.044040 |
| A2BP1 | 4126 | 1922585 | T | −3.14 | 0.009143 |
| WWOX | 4157 | 4129721 | G | 3.86 | 0.028820 |
| MPHOSPH6 | 4172 | 1862820 | G | −2.45 | 0.032610 |
| USP10 | 4206 | 1541699 | G | −3.07 | 0.018270 |
| USP10 | 4207 | 7188512 | C | −3.29 | 0.017400 |
| USP10 | 4208 | 964453 | G | −2.72 | 0.032580 |
| CA10 | 4250 | 9303606 | C | −3.96 | 0.001921 |
| CA10 | 4251 | 12945099 | C | −3.25 | 0.010160 |
| MSI2 | 4260 | 8065120 | A | 3.41 | 0.042170 |
| DNAH17 | 4267 | 7211232 | T | −5.00 | 0.022530 |
| DNAH17 | 4269 | 1515022 | A | −2.97 | 0.025710 |
| NEDD4L | 4329 | 10513914 | G | −2.97 | 0.034390 |
| NEDD4L | 4330 | 2075405 | G | −3.56 | 0.014510 |
| CCBE1 | 4336 | 17065761 | C | 4.89 | 0.006636 |
| DOK6 | 4381 | 4438406 | C | −2.47 | 0.041000 |
| MBP | 4383 | 470181 | G | −2.87 | 0.020090 |
| ZNF667 | 4387 | 10423617 | T | −3.23 | 0.029650 |
| FERMT1 | 4410 | 10373 | T | −2.44 | 0.038370 |
| PLCB1 | 4414 | 6055577 | A | 5.37 | 0.000740 |
| PLCB1 | 4415 | 2235212 | A | 3.82 | 0.009620 |
| MACROD2 | 4452 | 6043402 | A | 5.61 | 0.007932 |
| MACROD2 | 4459 | 1225890 | C | 3.82 | 0.005841 |
| PTPRT | 4505 | 6065520 | T | −4.12 | 0.034490 |
| KCNB1 | 4519 | 496511 | C | −3.32 | 0.006536 |
| CDH4 | 4539 | 6089573 | A | 2.78 | 0.023000 |
| NCAM2 | 4552 | 1599228 | C | −2.85 | 0.044800 |
| EFCAB6 | 4614 | 5764310 | C | 4.48 | 0.030870 |

TABLE 9
Alleles Influencing Time to Discontinuation for Perphenazine

| Gene | Seq ID | NCBI RS# | Allele | Beta (Months) | P |
|---|---|---|---|---|---|
| EPHB2 | 19 | 4655108 | A | 5.27 | 0.0053 |
| EPHB2 | 20 | 10799762 | C | 5.09 | 0.0135 |
| EPHB2 | 23 | 309499 | T | −3.07 | 0.0122 |
| LRP8 | 48 | 5174 | A | −2.95 | 0.0079 |
| LRP8 | 49 | 11206127 | A | −2.80 | 0.0148 |
| LRP8 | 50 | 869987 | T | −2.77 | 0.0219 |
| LRP8 | 52 | 2297660 | A | −2.63 | 0.0219 |
| LRP8 | 53 | 2297657 | A | −2.37 | 0.0440 |
| LRP8 | 54 | 12035926 | G | −2.45 | 0.0485 |
| NGF | 81 | 12145726 | G | 2.77 | 0.0321 |
| NGF | 83 | 11102925 | T | 3.53 | 0.0167 |
| NGF | 84 | 17033706 | A | 4.94 | 0.0025 |
| PTGFRN | 93 | 4641299 | G | −3.48 | 0.0100 |
| ATF6 | 98 | 2070150 | C | 4.57 | 0.0372 |
| ATF6 | 102 | 12401299 | G | 4.24 | 0.0396 |
| ATF6 | 106 | 12028953 | A | 4.57 | 0.0372 |
| ATF6 | 108 | 12040523 | T | 4.57 | 0.0372 |
| ESRRG | 172 | 12757165 | G | −2.51 | 0.0409 |
| ESRRG | 173 | 6658528 | T | −2.49 | 0.0397 |
| SLC35F3 | 191 | 10495346 | T | 5.44 | 0.0161 |
| GNG4 | 192 | 10925976 | A | −2.92 | 0.0139 |
| GNG4 | 193 | 508208 | G | 2.73 | 0.0302 |
| GNG4 | 194 | 488618 | G | −2.93 | 0.0133 |
| RYR2 | 210 | 1402803 | G | 3.55 | 0.0212 |
| CHRM3 | 222 | 1431719 | G | 2.41 | 0.0430 |
| FMN2 | 228 | 12118961 | T | −2.68 | 0.0336 |
| RGS7 | 260 | 10737861 | T | 3.34 | 0.0252 |
| PLD5 | 271 | 1548160 | C | 3.31 | 0.0106 |
| PLD5 | 272 | 12128054 | A | 2.56 | 0.0403 |
| C2ORF46 | 274 | 182971 | C | −2.82 | 0.0464 |
| C2ORF46 | 277 | 2562011 | C | 3.78 | 0.0393 |
| KCNK3 | 307 | 11126666 | A | 2.83 | 0.0397 |
| CRIM1 | 333 | 11681392 | T | 2.93 | 0.0201 |
| CRIM1 | 334 | 10189344 | C | 3.02 | 0.0207 |
| FEZ2 | 337 | 17488036 | C | 3.62 | 0.0052 |
| FEZ2 | 338 | 10197570 | T | 3.66 | 0.0053 |
| CDC42EP3 | 342 | 15628 | T | −7.37 | 0.0088 |
| SLC8A1 | 352 | 967351 | A | −2.41 | 0.0493 |
| C2ORF34 | 374 | 3738980 | C | 5.69 | 0.0021 |
| PRKCE | 386 | 13003856 | G | 2.26 | 0.0393 |
| PRKCE | 387 | 6748375 | C | −2.23 | 0.0489 |
| CCDC85A | 419 | 11696109 | A | −2.67 | 0.0228 |
| CCDC85A | 420 | 1159916 | G | −3.44 | 0.0084 |
| CCDC85A | 424 | 214041 | T | 3.48 | 0.0031 |
| CTNNA2 | 446 | 13033608 | C | −2.58 | 0.0239 |
| CTNNA2 | 447 | 2861914 | G | −2.38 | 0.0444 |
| CTNNA2 | 470 | 216616 | G | 2.87 | 0.0331 |
| CTNNA2 | 471 | 216630 | C | 2.78 | 0.0216 |
| CTNNA2 | 472 | 216657 | C | 2.75 | 0.0227 |
| NAP5 | 482 | 13432172 | G | 6.27 | 0.0270 |
| KYNU | 533 | 6430001 | A | −3.01 | 0.0214 |
| KYNU | 535 | 3816193 | A | −4.57 | 0.0067 |
| KCNJ3 | 591 | 2937609 | C | −2.78 | 0.0192 |
| SCN1A | 622 | 1461197 | A | 2.62 | 0.0354 |
| PARD3B | 658 | 1510765 | T | 3.17 | 0.0114 |
| PARD3B | 660 | 6760872 | C | 2.63 | 0.0356 |
| PARD3B | 661 | 4675490 | G | 2.55 | 0.0466 |
| PARD3B | 664 | 1100393 | G | 2.79 | 0.0410 |
| NRP2 | 675 | 6435306 | A | 2.41 | 0.0449 |
| ERBB4 | 680 | 1992029 | G | 3.43 | 0.0141 |
| CNTN4 | 757 | 11129074 | G | 2.64 | 0.0455 |
| RARB | 807 | 17526942 | T | −5.76 | 0.0101 |
| CLASP2 | 816 | 13098051 | C | 5.32 | 0.0041 |
| STAC | 826 | 3749279 | T | 3.88 | 0.0499 |
| FHIT | 916 | 212016 | C | 3.63 | 0.0128 |
| PTPRG | 940 | 9813294 | A | −2.60 | 0.0178 |
| PRICKLE2 | 962 | 153729 | A | −4.68 | 0.0105 |
| PRICKLE2 | 963 | 697280 | G | −4.01 | 0.0327 |
| PRICKLE2 | 965 | 696019 | A | −2.59 | 0.0456 |
| PRICKLE2 | 968 | 11924614 | C | −2.69 | 0.0317 |
| GBE1 | 989 | 17019088 | T | 4.05 | 0.0034 |
| GBE1 | 990 | 7618973 | G | 3.90 | 0.0039 |
| GBE1 | 993 | 3821548 | G | 3.09 | 0.0169 |
| GBE1 | 998 | 3860595 | C | 2.45 | 0.0491 |
| CDGAP | 1023 | 9855065 | A | −2.90 | 0.0225 |
| CDGAP | 1024 | 3732413 | G | 3.25 | 0.0285 |
| CLSTN2 | 1079 | 9875409 | G | 3.88 | 0.0046 |
| CLSTN2 | 1080 | 347975 | G | 3.25 | 0.0081 |
| CLSTN2 | 1081 | 347973 | A | 2.74 | 0.0271 |
| SPSB4 | 1084 | 4683550 | C | −4.38 | 0.0093 |
| SPSB4 | 1086 | 2086180 | G | −3.88 | 0.0221 |
| TNIK | 1102 | 17217552 | G | 7.19 | 0.0176 |
| NLGN1 | 1123 | 692486 | G | 2.58 | 0.0299 |
| NLGN1 | 1125 | 11713211 | C | 2.58 | 0.0299 |
| LDB2 | 1171 | 7690190 | A | 2.89 | 0.0202 |
| SLIT2 | 1188 | 10516357 | A | −3.02 | 0.0155 |
| PCDH7 | 1200 | 4611883 | G | 2.29 | 0.0357 |
| COL25A1 | 1318 | 7666215 | G | 2.64 | 0.0383 |
| COL25A1 | 1325 | 17596971 | G | 3.10 | 0.0355 |
| COL25A1 | 1328 | 711865 | A | −3.32 | 0.0063 |
| COL25A1 | 1329 | 794149 | G | −3.15 | 0.0090 |
| COL25A1 | 1330 | 1863293 | G | −3.11 | 0.0108 |
| COL25A1 | 1331 | 3096490 | A | −3.11 | 0.0108 |
| ANK2 | 1343 | 1989930 | G | 2.77 | 0.0243 |
| GPR103 | 1384 | 11732033 | A | 3.44 | 0.0256 |
| POU4F2 | 1431 | 6839918 | T | 4.31 | 0.0428 |
| DCLK2 | 1443 | 4696645 | A | 4.63 | 0.0132 |
| CTSO | 1446 | 6536124 | A | −3.12 | 0.0135 |
| CTSO | 1447 | 4608743 | C | −3.70 | 0.0171 |
| CTSO | 1448 | 17033891 | C | −3.56 | 0.0305 |
| FSTL5 | 1466 | 13110363 | G | −3.94 | 0.0334 |
| TLL1 | 1480 | 2292083 | A | 2.37 | 0.0457 |
| PALLD | 1483 | 6552873 | C | −3.67 | 0.0028 |
| PALLD | 1484 | 6552875 | T | −3.67 | 0.0028 |
| PALLD | 1485 | 6818921 | C | −3.67 | 0.0028 |
| PALLD | 1487 | 17054309 | A | 3.24 | 0.0301 |
| PALLD | 1488 | 10031058 | G | −3.67 | 0.0028 |
| PALLD | 1489 | 10009813 | G | 3.01 | 0.0274 |
| PALLD | 1490 | 6840767 | C | −4.05 | 0.0035 |
| PALLD | 1492 | 2712118 | C | −3.47 | 0.0063 |
| PALLD | 1493 | 2319900 | T | −3.22 | 0.0103 |
| ODZ3 | 1517 | 7668885 | T | −3.08 | 0.0248 |
| DNAH5 | 1556 | 7709692 | C | −3.22 | 0.0440 |
| CDH10 | 1574 | 7731953 | T | 4.20 | 0.0194 |
| SLC1A3 | 1581 | 4869676 | A | 3.00 | 0.0341 |
| SLC1A3 | 1582 | 1645651 | A | −2.74 | 0.0254 |
| ITGA1 | 1604 | 2860025 | T | 2.99 | 0.0223 |
| ITGA1 | 1605 | 1820167 | A | −2.70 | 0.0308 |
| PDE4D | 1624 | 12654005 | G | 2.75 | 0.0365 |
| THBS4 | 1660 | 2288395 | G | 3.16 | 0.0178 |
| VCAN | 1667 | 4558964 | G | 3.60 | 0.0156 |
| GPR98 | 1680 | 666659 | T | −2.63 | 0.0226 |
| GPR98 | 1681 | 688956 | C | −2.43 | 0.0314 |
| GPR98 | 1682 | 168743 | G | 2.42 | 0.0441 |
| PJA2 | 1720 | 1428931 | G | −4.01 | 0.0498 |
| SEMA6A | 1737 | 682684 | G | 2.89 | 0.0325 |
| ADAMTS19 | 1766 | 1363143 | C | 6.33 | 0.0011 |
| TRPC7 | 1777 | 3777150 | A | −3.15 | 0.0116 |
| CTNNA1 | 1781 | 10043478 | G | −2.31 | 0.0398 |
| PHACTR1 | 1818 | 1537340 | A | −3.07 | 0.0382 |
| PHACTR1 | 1820 | 13219256 | T | −2.85 | 0.0451 |
| PARC | 1884 | 17209372 | G | −4.86 | 0.0459 |
| RIMS1 | 1900 | 575472 | G | −3.10 | 0.0216 |
| RIMS1 | 1902 | 1010326 | A | −3.32 | 0.0227 |
| RIMS1 | 1905 | 2496495 | G | −2.71 | 0.0399 |
| TRDN | 1935 | 13190807 | C | −3.11 | 0.0268 |
| NKAIN2 | 1966 | 1871329 | C | 3.76 | 0.0136 |
| NKAIN2 | 1968 | 6906607 | A | 4.13 | 0.0181 |
| NKAIN2 | 1969 | 609783 | T | 3.59 | 0.0394 |
| EYA4 | 1972 | 533729 | T | 4.30 | 0.0065 |
| EYA4 | 1973 | 211443 | G | 4.09 | 0.0107 |
| EYA4 | 1975 | 6941879 | G | 3.47 | 0.0225 |
| PARK2 | 2023 | 10945767 | T | −2.92 | 0.0091 |
| PARK2 | 2024 | 9365311 | C | 2.45 | 0.0278 |
| PARK2 | 2027 | 4279411 | G | 2.59 | 0.0448 |
| PARK2 | 2031 | 6930668 | T | 2.85 | 0.0368 |
| PAPK2 | 2043 | 9347659 | G | −3.36 | 0.0239 |
| PARK2 | 2047 | 9365473 | T | −3.18 | 0.0319 |
| SKAP2 | 2117 | 774256 | G | 2.99 | 0.0437 |
| SKAP2 | 2118 | 774250 | T | 3.60 | 0.0218 |
| CREB5 | 2122 | 1544469 | G | 2.84 | 0.0433 |
| BMPER | 2170 | 1420335 | C | −3.46 | 0.0063 |
| CDC2L5 | 2186 | 3800802 | T | −2.98 | 0.0245 |
| CDC2L5 | 2187 | 10277422 | C | −4.12 | 0.0072 |
| ABCA13 | 2214 | 6958356 | A | 3.71 | 0.0041 |
| GRB10 | 2215 | 2244347 | C | 2.91 | 0.0347 |
| GRB10 | 2217 | 2244351 | G | 3.12 | 0.0218 |
| HIP1 | 2256 | 17352471 | A | 3.39 | 0.0212 |
| HIP1 | 2257 | 1018945 | G | 2.99 | 0.0177 |
| HIP1 | 2258 | 757364 | T | −3.45 | 0.0049 |
| HIP1 | 2259 | 2525467 | C | −2.57 | 0.0458 |
| PCLO | 2311 | 17156675 | T | −3.73 | 0.0064 |
| PCLO | 2324 | 2522843 | A | −3.12 | 0.0120 |
| SEMA3E | 2346 | 1972459 | C | 2.59 | 0.0372 |
| ABCB4 | 2348 | 31659 | C | −4.54 | 0.0327 |
| ABCB4 | 2349 | 2097937 | G | −3.25 | 0.0299 |
| CUX1 | 2408 | 2694158 | T | 2.77 | 0.0311 |
| CUX1 | 2409 | 803064 | C | −4.69 | 0.0009 |
| TBXAS1 | 2482 | 6464451 | C | 9.45 | 0.0094 |
| TBXAS1 | 2484 | 8192813 | T | 9.45 | 0.0094 |
| CNTNAP2 | 2496 | 7802708 | G | 2.38 | 0.0388 |
| PTPRN2 | 2532 | 10265417 | T | 3.88 | 0.0014 |
| PTPRN2 | 2534 | 10266729 | T | 3.86 | 0.0015 |
| PTPRN2 | 2535 | 2878355 | A | 3.10 | 0.0216 |
| SGCZ | 2588 | 6651381 | A | −3.01 | 0.0186 |
| SLC25A37 | 2632 | 10503726 | C | −3.38 | 0.0156 |
| SLC25A37 | 2633 | 7826247 | G | −4.07 | 0.0034 |
| SLC25A37 | 2634 | 11778179 | T | −3.44 | 0.0171 |
| SFRP1 | 2646 | 7843510 | G | −2.71 | 0.0223 |
| SFRP1 | 2648 | 7833518 | T | −2.48 | 0.0353 |
| SNTG1 | 2666 | 1542615 | T | −5.07 | 0.0370 |
| SNTG1 | 2667 | 2623207 | C | −5.03 | 0.0388 |
| SNTG1 | 2669 | 2623224 | A | −5.03 | 0.0388 |
| DEPDC2 | 2729 | 16934215 | A | −4.41 | 0.0099 |
| DEPDC2 | 2730 | 3793379 | A | −3.94 | 0.0133 |
| DEPDC2 | 2731 | 3793381 | A | −3.92 | 0.0158 |
| ZFPM2 | 2791 | 10464844 | G | 2.77 | 0.0428 |
| ZFPM2 | 2793 | 16873003 | C | 2.88 | 0.0433 |
| ZFPM2 | 2800 | 1442326 | G | −2.57 | 0.0442 |
| CSMD3 | 2816 | 1513524 | C | −2.53 | 0.0343 |
| CSMD3 | 2817 | 2954892 | G | −2.53 | 0.0343 |
| MTSS1 | 2849 | 1988734 | A | 2.83 | 0.0177 |
| MTSS1 | 2851 | 4871503 | C | −4.01 | 0.0122 |
| FAM84B | 2857 | 16901667 | T | −3.61 | 0.0132 |
| SMARCA2 | 2924 | 7048496 | A | −4.12 | 0.0265 |
| SMARCA2 | 2925 | 6475520 | G | −4.49 | 0.0214 |
| SMARCA2 | 2926 | 6475522 | A | −4.61 | 0.0185 |
| SMARCA2 | 2927 | 10757205 | G | −5.56 | 0.0105 |
| PTPRD | 2954 | 10815933 | C | 3.07 | 0.0230 |
| PTPRD | 2955 | 1036328 | C | 2.96 | 0.0251 |
| PTPRD | 2956 | 7868093 | T | 2.67 | 0.0418 |
| KIAA1797 | 2962 | 2151002 | A | 2.78 | 0.0241 |
| KIAA1797 | 2978 | 7030990 | G | −3.49 | 0.0127 |
| KIAA1797 | 2980 | 4468020 | T | −2.72 | 0.0375 |
| APBA1 | 3002 | 10867656 | C | −4.77 | 0.0119 |
| APBA1 | 3003 | 7866199 | C | −4.58 | 0.0182 |
| APBA1 | 3006 | 7872660 | T | −4.19 | 0.0195 |
| TMC1 | 3042 | 2501914 | T | −2.41 | 0.0329 |
| PCSK5 | 3056 | 10869698 | A | −2.65 | 0.0398 |
| PCSK5 | 3057 | 10512054 | C | −3.57 | 0.0050 |
| DIRAS2 | 3087 | 532591 | C | −3.61 | 0.0054 |
| DIRAS2 | 3088 | 7028171 | A | 2.71 | 0.0483 |
| GRIN3A | 3110 | 2786716 | C | 3.05 | 0.0134 |
| DAB2IP | 3143 | 10985431 | T | 4.78 | 0.0496 |
| TTLL11 | 3148 | 10985529 | T | 2.93 | 0.0247 |
| EXOSC2 | 3164 | 4740358 | C | −3.92 | 0.0222 |
| KCNT1 | 3197 | 11103150 | A | −6.26 | 0.0182 |
| CACNA1B | 3211 | 11137363 | T | 3.35 | 0.0220 |
| PITRM1 | 3221 | 1127047 | T | −7.85 | 0.0320 |
| CUGBP2 | 3232 | 2938015 | A | 2.92 | 0.0466 |
| CACNB2 | 3236 | 10828679 | G | −3.89 | 0.0440 |
| ARMC3 | 3252 | 12252340 | T | 3.43 | 0.0210 |
| MYO3A | 3262 | 10741104 | C | −2.79 | 0.0308 |
| MYO3A | 3264 | 10828912 | A | −2.79 | 0.0308 |
| MYO3A | 3268 | 4749090 | C | 3.69 | 0.0332 |
| MYO3A | 3280 | 1999240 | C | −2.54 | 0.0339 |
| MYO3A | 3285 | 12764197 | G | 3.37 | 0.0483 |
| JMJD1C | 3301 | 9629895 | A | −3.04 | 0.0157 |
| JMJD1C | 3303 | 2893922 | C | −3.79 | 0.0063 |
| CDH23 | 3312 | 3802711 | T | −3.75 | 0.0039 |
| CDH23 | 3315 | 2070968 | A | −2.88 | 0.0352 |
| SORCS3 | 3374 | 2491377 | T | 2.75 | 0.0337 |
| SORCS3 | 3382 | 2177744 | C | −3.25 | 0.0375 |
| STIM1 | 3463 | 10835407 | G | 2.62 | 0.0416 |
| STIM1 | 3467 | 725519 | T | 2.53 | 0.0438 |
| MICAL2 | 3473 | 1159649 | C | 3.41 | 0.0069 |
| MICAL2 | 3474 | 10765929 | T | 2.98 | 0.0178 |
| MICAL2 | 3480 | 1493955 | A | 5.19 | 0.0169 |
| ARNTL | 3486 | 10766066 | G | 2.75 | 0.0358 |
| ARNTL | 3489 | 4414197 | T | 2.72 | 0.0378 |
| SPON1 | 3505 | 12283632 | A | −2.95 | 0.0322 |
| SPON1 | 3508 | 7950377 | T | −3.71 | 0.0082 |
| SPON1 | 3509 | 7116296 | T | 2.86 | 0.0252 |
| SPON1 | 3510 | 11023088 | T | 2.82 | 0.0301 |
| C11ORF49 | 3519 | 11039105 | T | 3.25 | 0.0110 |
| C11ORF49 | 3521 | 747650 | A | 3.18 | 0.0128 |
| ELMOD1 | 3559 | 683266 | A | −3.00 | 0.0216 |
| OPCML | 3584 | 4937782 | T | −3.82 | 0.0085 |
| OPCML | 3585 | 7936263 | G | −3.49 | 0.0222 |
| OPCML | 3588 | 7108751 | T | −3.85 | 0.0055 |
| N4BP2L2 | 3699 | 206336 | G | 2.50 | 0.0347 |
| TRPC4 | 3731 | 1924378 | A | 2.43 | 0.0413 |
| LMO7 | 3742 | 7335067 | A | 2.76 | 0.0321 |
| GPC5 | 3764 | 7983063 | G | 3.01 | 0.0317 |
| GPC5 | 3765 | 653774 | T | −2.68 | 0.0254 |
| GPC5 | 3766 | 655169 | T | −2.63 | 0.0288 |
| GPC5 | 3771 | 553717 | A | −5.43 | 0.0124 |
| GPC5 | 3772 | 342678 | A | −5.43 | 0.0124 |
| GPC5 | 3773 | 342677 | A | −4.32 | 0.0426 |
| GPC5 | 3775 | 7986797 | A | −6.13 | 0.0455 |
| GPC5 | 3776 | 9515971 | G | −2.89 | 0.0214 |
| GPC5 | 3787 | 913005 | T | −2.55 | 0.0349 |
| GPC6 | 3818 | 10492635 | C | 3.14 | 0.0230 |
| NPAS3 | 3866 | 243291 | G | 2.62 | 0.0307 |
| NPAS3 | 3869 | 1579702 | G | 2.43 | 0.0374 |
| SLC25A21 | 3881 | 712377 | C | 2.69 | 0.0419 |
| SLC25A21 | 3883 | 10872897 | T | 2.56 | 0.0433 |
| SAMD4A | 3913 | 709939 | C | −3.20 | 0.0128 |
| SAMD4A | 3915 | 8021957 | T | −3.05 | 0.0150 |
| SAMD4A | 3916 | 8021151 | G | −3.09 | 0.0166 |
| SAMD4A | 3917 | 2057369 | A | 3.17 | 0.0198 |
| SAMD4A | 3918 | 17128004 | A | 3.17 | 0.0198 |
| SAMD4A | 3919 | 10483639 | C | 3.17 | 0.0198 |
| RGS6 | 3949 | 10149207 | G | 3.04 | 0.0149 |
| RGS6 | 3952 | 2238192 | A | 3.31 | 0.0066 |
| RGS6 | 3954 | 2803947 | A | 2.52 | 0.0484 |
| KCNK10 | 3964 | 1950279 | T | 3.82 | 0.0017 |
| KCNK10 | 3965 | 17698533 | C | 3.89 | 0.0020 |
| KCNK10 | 3966 | 12185033 | T | 3.34 | 0.0074 |
| RYR3 | 4019 | 2670947 | G | 3.30 | 0.0046 |
| RYR3 | 4020 | 2676083 | T | 3.19 | 0.0079 |
| RYR3 | 4022 | 2670944 | G | 2.61 | 0.0394 |
| RYR3 | 4035 | 11072734 | G | −2.88 | 0.0293 |
| RYR3 | 4036 | 891343 | T | −3.09 | 0.0184 |
| CGNL1 | 4070 | 7182648 | T | 2.83 | 0.0323 |
| RORA | 4082 | 11071548 | G | −3.38 | 0.0061 |
| CLK3 | 4084 | 12441932 | G | −3.89 | 0.0293 |
| CLK3 | 4085 | 2068982 | A | −3.81 | 0.0329 |
| HYDIN | 4150 | 9939194 | T | 2.61 | 0.0470 |
| WWOX | 4157 | 4129721 | G | 4.71 | 0.0449 |
| CDH13 | 4203 | 8049546 | A | −3.05 | 0.0406 |
| CDH13 | 4204 | 33121 | G | −3.39 | 0.0108 |
| DNAH17 | 4264 | 16971269 | C | −3.26 | 0.0104 |
| DNAH17 | 4265 | 647727 | C | −2.96 | 0.0235 |
| DNAH17 | 4267 | 7211232 | T | −4.14 | 0.0113 |
| DLGAP1 | 4276 | 9635857 | G | −3.43 | 0.0267 |
| DLGAP1 | 4278 | 7245298 | G | −3.38 | 0.0315 |
| ZFP161 | 4281 | 581144 | T | −3.30 | 0.0135 |
| ZFP161 | 4282 | 990072 | T | −3.87 | 0.0005 |
| ZFP161 | 4283 | 11665417 | T | 3.81 | 0.0009 |
| ZFP161 | 4284 | 9945680 | A | 3.81 | 0.0009 |
| KIAA0802 | 4306 | 17408213 | T | 4.07 | 0.0092 |
| OSBPL1A | 4310 | 275857 | C | −5.38 | 0.0462 |
| CDH7 | 4349 | 7241038 | T | −2.16 | 0.0470 |
| DOK6 | 4378 | 8097743 | G | 2.79 | 0.0145 |
| PLCB4 | 4437 | 13036731 | G | −6.85 | 0.0383 |
| SEC23B | 4486 | 1555354 | C | 3.49 | 0.0226 |
| SEC23B | 4488 | 2273526 | G | 3.63 | 0.0424 |
| PTPRT | 4502 | 6124439 | A | 2.99 | 0.0413 |
| PTPRT | 4506 | 6016864 | A | 2.49 | 0.0475 |
| C21ORF37 | 4541 | 2824301 | G | −2.61 | 0.0235 |
| PDE9A | 4564 | 12626774 | C | 3.75 | 0.0044 |
| ARFGAP3 | 4578 | 5758951 | G | −3.09 | 0.0101 |
| ARFGAP3 | 4579 | 2024645 | T | −2.94 | 0.0174 |
| ARFGAP3 | 4580 | 5758965 | A | −2.87 | 0.0186 |
| ARFGAP3 | 4581 | 5758972 | T | −2.50 | 0.0288 |
| ARFGAP3 | 4582 | 738536 | A | −2.27 | 0.0448 |
| PACSIN2 | 4584 | 12166809 | A | −2.77 | 0.0222 |
| PACSIN2 | 4588 | 7286299 | A | −2.58 | 0.0245 |
| PACSIN2 | 4589 | 737782 | G | −2.47 | 0.0291 |
| EFCAB6 | 4597 | 137160 | G | −2.60 | 0.0245 |
| EFCAB6 | 4598 | 9614382 | G | −2.70 | 0.0478 |
| EFCAB6 | 4600 | 2374773 | A | −2.78 | 0.0336 |

TABLE 10
Alleles Influencing Time to Discontinuation for Ziprasidone

| | | | | Beta | |
|---|---|---|---|---|---|
| Gene | Seq ID | NCBI RS# | Allele | (Months) | P |
| AGBL4-C1ORF165 | 27 | 1934395 | G | 4.80 | 0.0271 |
| LRP8 | 57 | 1288519 | C | −4.06 | 0.0307 |
| ESRRG | 180 | 11117642 | T | 5.44 | 0.0114 |
| ESRRG | 184 | 7529655 | A | −5.33 | 0.0260 |
| GNG4 | 194 | 488618 | G | −3.52 | 0.0290 |
| RYR2 | 201 | 10802596 | T | 3.43 | 0.0307 |
| FMN2 | 235 | 10926168 | G | −5.41 | 0.0044 |
| FMN2 | 236 | 7520065 | G | −5.41 | 0.0044 |
| FMN2 | 238 | 10926188 | G | −4.04 | 0.0337 |
| RGS7 | 255 | 191735 | A | 3.32 | 0.0496 |
| C2ORF46 | 277 | 2562011 | C | −5.56 | 0.0407 |
| DDEF2 | 283 | 10593 | G | −6.24 | 0.0151 |
| CRIM1 | 334 | 10189344 | C | 4.39 | 0.0074 |
| FEZ2 | 335 | 3770811 | T | 4.59 | 0.0047 |
| FEZ2 | 336 | 1533946 | G | 4.50 | 0.0056 |
| FEZ2 | 338 | 10197570 | T | 4.45 | 0.0070 |
| SLC8A1 | 347 | 11885401 | C | 6.21 | 0.0065 |
| SLC8A1 | 353 | 13017237 | A | 9.79 | 0.0090 |
| SLC8A1 | 354 | 9789739 | A | 9.63 | 0.0258 |
| EPAS1 | 395 | 1530632 | C | −3.98 | 0.0417 |
| EPAS1 | 397 | 7571218 | A | −3.93 | 0.0196 |
| FBXO11 | 398 | 874869 | C | −3.81 | 0.0418 |
| PSME4 | 410 | 1363061 | T | −5.57 | 0.0106 |
| CCDC85A | 427 | 10460558 | A | −3.89 | 0.0467 |
| CTNNA2 | 453 | 17018760 | T | −6.17 | 0.0027 |
| CTNNA2 | 454 | 1006607 | G | −6.68 | 0.0035 |
| CTNNA2 | 456 | 2120408 | C | −6.68 | 0.0035 |
| CTNNA2 | 457 | 2165975 | T | −6.68 | 0.0035 |
| CTNNA2 | 458 | 6547299 | A | 3.53 | 0.0346 |
| CTNNA2 | 461 | 17018918 | G | −7.13 | 0.0170 |
| CTNNA2 | 473 | 3770369 | C | −3.46 | 0.0238 |
| NAP5 | 483 | 12991216 | A | 4.15 | 0.0189 |
| KCNJ3 | 590 | 3111017 | T | 3.80 | 0.0377 |
| SCN3A | 616 | 1550385 | G | −4.19 | 0.0206 |
| CERKL | 632 | 895901 | A | 3.69 | 0.0310 |
| CERKL | 635 | 4018756 | A | −3.55 | 0.0116 |
| PDE1A | 641 | 6736414 | T | −4.86 | 0.0300 |
| DNER | 715 | 17677612 | T | 7.75 | 0.0422 |
| CHRND | 730 | 2697800 | A | −4.77 | 0.0138 |
| CNTN4 | 769 | 9823500 | C | −4.07 | 0.0428 |
| ITPR1 | 780 | 3804993 | G | −3.82 | 0.0375 |
| ATP2B2 | 788 | 1438168 | G | −6.00 | 0.0003 |
| ATP2B2 | 789 | 4684687 | T | −3.58 | 0.0282 |
| ATP2B2 | 793 | 34923 | G | −4.59 | 0.0037 |
| SLC6A6 | 798 | 11713355 | A | −4.79 | 0.0330 |
| RARB | 809 | 6774124 | C | 4.25 | 0.0199 |
| RARB | 810 | 1881707 | A | 3.94 | 0.0439 |
| GPX1 | 857 | 9827708 | G | 4.68 | 0.0220 |
| CACNA2D3 | 864 | 11130396 | T | 4.97 | 0.0058 |
| CACNA2D3 | 870 | 4384925 | G | −4.10 | 0.0229 |
| ERC2 | 877 | 3796232 | G | 4.66 | 0.0023 |
| ERC2 | 879 | 2132237 | C | 3.16 | 0.0406 |
| FLNB | 911 | 12632456 | A | −4.43 | 0.0025 |
| PTPRG | 932 | 6794009 | G | −4.98 | 0.0014 |
| PRICKLE2 | 964 | 696017 | A | −9.34 | 0.0058 |
| PRICKLE2 | 969 | 704398 | G | −8.11 | 0.0103 |
| PRICKLE2 | 970 | 697288 | T | −6.36 | 0.0336 |
| KALRN | 1037 | 2008839 | A | −6.67 | 0.0189 |
| KALRN | 1038 | 2008847 | T | −6.19 | 0.0402 |
| SERPINI2 | 1090 | 13062550 | C | 3.53 | 0.0244 |
| TNIK | 1101 | 9824475 | G | −3.43 | 0.0478 |
| LEPREL1 | 1132 | 1719607 | A | 3.67 | 0.0454 |
| LEPREL1 | 1136 | 17424551 | G | 3.83 | 0.0145 |
| UBXD7 | 1151 | 6774540 | T | −3.77 | 0.0304 |
| UBXD7 | 1152 | 9841810 | C | −3.61 | 0.0370 |
| UBXD7 | 1153 | 9847223 | T | −3.61 | 0.0370 |
| LDB2 | 1169 | 1501142 | G | 3.95 | 0.0325 |
| LDB2 | 1171 | 7690190 | A | 3.03 | 0.0453 |
| SLIT2 | 1191 | 9992591 | C | −3.09 | 0.0484 |
| UBE2K | 1213 | 2054718 | T | −5.34 | 0.0261 |
| N4BP2 | 1215 | 4974970 | A | 3.25 | 0.0476 |
| LIMCH1 | 1218 | 10026397 | A | 4.76 | 0.0464 |
| LIMCH1 | 1222 | 10805090 | G | 4.01 | 0.0423 |
| LPHN3 | 1232 | 950313 | C | 5.23 | 0.0143 |
| LPHN3 | 1233 | 1124974 | A | 4.55 | 0.0330 |
| FAM13A1 | 1283 | 6814344 | G | 3.74 | 0.0143 |
| FAM13A1 | 1284 | 13131633 | T | 3.74 | 0.0143 |
| PDLIM5 | 1293 | 2510777 | C | −4.41 | 0.0135 |
| PDLIM5 | 1294 | 3805274 | A | 6.81 | 0.0142 |
| PDLIM5 | 1298 | 11735212 | A | 4.69 | 0.0150 |
| ANK2 | 1354 | 17045935 | C | −4.22 | 0.0377 |
| ANK2 | 1355 | 2272229 | T | −4.22 | 0.0377 |
| GPR103 | 1381 | 13110738 | G | 3.78 | 0.0275 |
| IL15 | 1403 | 6841939 | A | 5.35 | 0.0018 |
| IL15 | 1408 | 6821171 | G | −4.73 | 0.0174 |
| CTSO | 1449 | 10517625 | C | −5.06 | 0.0091 |
| FSTL5 | 1461 | 45426 | T | 3.95 | 0.0145 |
| TLL1 | 1474 | 6844820 | G | 3.85 | 0.0233 |
| AHRR | 1533 | 4956936 | C | 3.62 | 0.0435 |
| SEMA5A | 1535 | 985723 | A | −5.71 | 0.0138 |
| SEMA5A | 1537 | 2962699 | T | −4.97 | 0.0339 |
| SEMA5A | 1538 | 786843 | G | −4.42 | 0.0143 |
| SEMA5A | 1539 | 257098 | G | −4.34 | 0.0443 |
| SEMA5A | 1540 | 786846 | C | −4.34 | 0.0443 |
| DNAH5 | 1547 | 1354191 | G | 3.62 | 0.0256 |
| DNAH5 | 1549 | 6876673 | T | 3.21 | 0.0475 |
| EGFLAM | 1590 | 1469421 | A | 9.90 | 0.0216 |
| EGFLAM | 1596 | 2731979 | C | −5.55 | 0.0305 |
| ITGA2 | 1619 | 3212527 | G | 3.66 | 0.0459 |
| PDE4D | 1632 | 294494 | A | −5.74 | 0.0162 |
| PDE4D | 1633 | 295954 | G | −6.72 | 0.0179 |
| PDE4D | 1634 | 295955 | G | −7.16 | 0.0182 |
| PDE4D | 1635 | 295963 | C | −6.62 | 0.0286 |
| ODZ2 | 1787 | 2337017 | C | 9.01 | 0.0001 |
| ODZ2 | 1789 | 1421989 | G | 5.38 | 0.0057 |
| ODZ2 | 1795 | 6555784 | T | 6.44 | 0.0110 |
| ODZ2 | 1797 | 7708354 | G | −3.99 | 0.0203 |
| WWC1 | 1802 | 10038727 | A | 3.19 | 0.0493 |
| JARID2 | 1831 | 4085876 | T | −4.30 | 0.0230 |
| JARID2 | 1832 | 9476827 | T | −4.08 | 0.0325 |
| JARID2 | 1833 | 2282821 | A | 3.86 | 0.0389 |
| SLC17A4 | 1845 | 4712963 | T | 3.38 | 0.0369 |
| SLC17A1 | 1853 | 1324082 | A | 4.13 | 0.0301 |
| SLC17A1 | 1854 | 1165196 | C | −4.07 | 0.0066 |
| SLC17A1 | 1856 | 1165177 | T | −3.47 | 0.0187 |
| SLC17A1 | 1857 | 4712976 | T | 4.23 | 0.0349 |
| SLC17A3 | 1862 | 1165205 | A | −3.47 | 0.0187 |
| SLC17A2 | 1865 | 3799371 | T | 3.94 | 0.0071 |
| SLC17A2 | 1866 | 6938233 | T | 3.94 | 0.0071 |
| SLC17A2 | 1867 | 2071297 | C | 3.94 | 0.0071 |
| SLC17A2 | 1868 | 442601 | C | −2.92 | 0.0380 |
| SLC17A2 | 1869 | 9467646 | G | 3.94 | 0.0071 |
| SLC17A2 | 1870 | 9467652 | G | 3.49 | 0.0171 |
| BTN3A3 | 1874 | 2237236 | G | 3.62 | 0.0471 |
| TJAP1 | 1886 | 1106841 | C | −4.56 | 0.0076 |
| TJAP1 | 1887 | 1096699 | A | −4.00 | 0.0275 |
| RIMS1 | 1909 | 11754022 | T | −3.89 | 0.0342 |
| RIMS1 | 1910 | 10498882 | G | −3.20 | 0.0349 |
| RIMS1 | 1911 | 2807531 | A | −3.17 | 0.0402 |
| RIMS1 | 1912 | 1339226 | G | −5.22 | 0.0120 |
| RIMS1 | 1913 | 1546914 | T | −5.22 | 0.0120 |
| RIMS1 | 1917 | 12525154 | A | −4.53 | 0.0353 |
| KLHL32 | 1925 | 1206149 | A | −4.01 | 0.0143 |
| SLC22A16 | 1926 | 9400390 | T | −4.52 | 0.0082 |
| SLC22A16 | 1927 | 9320331 | A | −6.63 | 0.0032 |
| SLC22A16 | 1928 | 9481067 | G | −3.29 | 0.0485 |
| UTRN | 1997 | 601873 | A | 3.65 | 0.0261 |
| UTRN | 1998 | 622718 | T | 3.37 | 0.0385 |
| UTRN | 2001 | 7765923 | A | 4.18 | 0.0359 |
| SYNE1 | 2003 | 2295190 | T | −4.67 | 0.0485 |
| SLC22A3 | 2013 | 12194182 | C | −5.11 | 0.0149 |
| SLC22A3 | 2014 | 3123636 | C | −4.62 | 0.0170 |
| SLC22A3 | 2015 | 2048327 | G | −3.96 | 0.0307 |
| PDE10A | 2056 | 486002 | G | −3.05 | 0.0426 |
| SDK1 | 2076 | 10951446 | A | 3.06 | 0.0398 |
| SDK1 | 2077 | 4723434 | A | −3.39 | 0.0217 |
| ETV1 | 2097 | 4721286 | T | −3.89 | 0.0465 |
| ETV1 | 2099 | 2237295 | G | 3.36 | 0.0426 |
| FERD3L | 2107 | 6967799 | T | 4.25 | 0.0382 |
| FLJ22374 | 2144 | 6956143 | G | 3.42 | 0.0350 |
| PDE1C | 2155 | 6952633 | G | 3.89 | 0.0259 |
| BMPER | 2164 | 6975236 | T | −4.38 | 0.0064 |
| VPS41 | 2181 | 859522 | G | 6.61 | 0.0299 |
| WBSCR17 | 2237 | 11768233 | A | −3.51 | 0.0257 |
| CACNA2D1 | 2303 | 12535840 | G | 3.56 | 0.0387 |
| CACNA2D1 | 2309 | 2059037 | C | 8.11 | 0.0023 |
| CACNA2D1 | 2314 | 1468400 | A | −4.44 | 0.0254 |
| PCLO | 2318 | 1407640 | C | −3.56 | 0.0428 |
| SEMA3E | 2335 | 2713154 | G | −4.36 | 0.0077 |
| SEMA3E | 2336 | 2713151 | T | −4.07 | 0.0145 |
| SEMA3E | 2337 | 2709890 | A | −4.07 | 0.0145 |
| SEMA3E | 2339 | 2713174 | C | −4.07 | 0.0145 |
| SEMA3E | 2341 | 10270844 | T | 3.96 | 0.0349 |
| SEMA3A | 2347 | 1989964 | T | −3.31 | 0.0281 |
| DYNC1I1 | 2384 | 1227517 | A | −2.90 | 0.0453 |
| PON1 | 2385 | 13223537 | C | −4.34 | 0.0067 |
| ZNF3 | 2398 | 7778571 | G | 4.12 | 0.0161 |
| CNTNAP2 | 2496 | 7802708 | G | 4.92 | 0.0048 |
| PTPRN2 | 2528 | 6459879 | C | 4.31 | 0.0174 |
| PTPRN2 | 2531 | 4909222 | G | −5.59 | 0.0163 |
| PTPRN2 | 2532 | 10265417 | T | −4.51 | 0.0057 |
| PTPRN2 | 2534 | 10266729 | T | −4.37 | 0.0092 |
| CSMD1 | 2538 | 4875250 | G | −4.92 | 0.0215 |
| CSMD1 | 2541 | 13272021 | C | 4.75 | 0.0182 |
| CSMD1 | 2543 | 13260434 | A | 4.76 | 0.0089 |
| MCPH1 | 2571 | 1057090 | T | −3.19 | 0.0322 |
| MCPH1 | 2572 | 2911968 | C | −4.02 | 0.0109 |
| PEBP4 | 2630 | 2457426 | C | −3.90 | 0.0127 |
| UNC5D | 2642 | 7826624 | T | 5.58 | 0.0043 |
| SNTG1 | 2670 | 7832799 | A | −4.52 | 0.0142 |
| SNTG1 | 2671 | 1484128 | T | −5.06 | 0.0039 |
| SNTG1 | 2672 | 1484129 | T | −5.13 | 0.0054 |
| DEPDC2 | 2726 | 2053140 | A | 3.90 | 0.0168 |
| DEPDC2 | 2732 | 7007570 | G | −4.38 | 0.0052 |
| KCNB2 | 2752 | 13279934 | G | −3.76 | 0.0390 |
| MMP16 | 2763 | 2139481 | T | 4.90 | 0.0059 |
| ZFPM2 | 2798 | 9643020 | A | 5.63 | 0.0111 |
| ZFPM2 | 2803 | 16873677 | A | 6.33 | 0.0134 |
| ZFPM2 | 2808 | 1372614 | G | 7.38 | 0.0015 |
| SAMD12 | 2824 | 2514588 | T | −3.76 | 0.0162 |
| SAMD12 | 2825 | 1607924 | G | −3.76 | 0.0162 |
| PIP5K1B | 2996 | 17392931 | C | 3.56 | 0.0417 |
| TMC1 | 3030 | 6560293 | A | 3.57 | 0.0306 |
| TMC1 | 3032 | 13285999 | A | 4.15 | 0.0109 |
| TMC1 | 3040 | 1663763 | T | −4.70 | 0.0060 |
| TMC1 | 3042 | 2501914 | T | 3.32 | 0.0311 |
| PCSK5 | 3054 | 1029035 | C | 3.30 | 0.0423 |
| DAPK1 | 3084 | 3128499 | G | 3.41 | 0.0403 |
| ZNF169 | 3097 | 12236219 | T | 8.59 | 0.0235 |
| ZNF169 | 3098 | 7037298 | T | −5.08 | 0.0053 |
| SVEP1 | 3124 | 963143 | A | −3.23 | 0.0363 |
| SVEP1 | 3126 | 10759422 | C | −5.04 | 0.0091 |
| CDK5RAP2 | 3135 | 4836819 | A | 3.96 | 0.0491 |
| RALGPS1 | 3156 | 12551115 | C | 3.82 | 0.0205 |
| RALGPS1 | 3157 | 12350252 | A | 3.20 | 0.0430 |
| NTNG2 | 3174 | 10901133 | C | 4.14 | 0.0224 |
| VAV2 | 3189 | 2810473 | T | −4.20 | 0.0474 |
| VAV2 | 3190 | 2519109 | A | 3.49 | 0.0413 |
| VAV2 | 3192 | 2073829 | G | 3.74 | 0.0186 |
| NOTCH1 | 3200 | 10870085 | T | 5.69 | 0.0157 |
| CACNA1B | 3208 | 10867093 | T | 5.27 | 0.0472 |
| MYO3A | 3275 | 7097387 | C | 3.33 | 0.0364 |
| MYO3A | 3285 | 12764197 | G | 5.89 | 0.0029 |
| MYO3A | 3287 | 3781117 | C | 4.39 | 0.0263 |
| KCNMA1 | 3338 | 1978868 | A | 4.83 | 0.0121 |
| GALNTL4 | 3469 | 4910289 | C | −3.44 | 0.0476 |
| ARNTL | 3484 | 2054605 | T | −3.48 | 0.0262 |
| SPON1 | 3498 | 1528667 | G | 3.58 | 0.0461 |
| DLG2 | 3531 | 11233708 | T | −4.18 | 0.0137 |
| OPCML | 3569 | 3016388 | C | 3.76 | 0.0460 |
| OPCML | 3570 | 3016382 | T | −4.13 | 0.0410 |
| STYK1 | 3608 | 2900467 | G | −3.66 | 0.0111 |
| LOC729025 | 3618 | 10219568 | A | −4.68 | 0.0029 |
| LOC729025 | 3625 | 3915237 | C | −4.68 | 0.0080 |
| NAV3 | 3672 | 1012088 | G | −3.44 | 0.0335 |
| NAV3 | 3678 | 1375287 | C | −5.59 | 0.0013 |
| NBEA | 3715 | 7333195 | T | 3.68 | 0.0157 |
| GPC5 | 3771 | 553717 | A | 3.65 | 0.0358 |
| GPC5 | 3774 | 4773644 | A | 6.73 | 0.0096 |
| GPC5 | 3775 | 7986797 | A | 6.50 | 0.0160 |
| NOVA1 | 3860 | 8008779 | C | 3.44 | 0.0450 |
| NPAS3 | 3872 | 6571604 | C | 6.10 | 0.0117 |
| NPAS3 | 3873 | 6571605 | A | 6.10 | 0.0117 |
| SLC25A21 | 3882 | 2022601 | A | 3.94 | 0.0181 |
| SLC25A21 | 3884 | 1154121 | T | 3.52 | 0.0409 |
| SLC25A21 | 3885 | 1367029 | A | 3.22 | 0.0410 |
| KCNK10 | 3963 | 4424855 | T | −6.33 | 0.0265 |
| CCDC88C | 3988 | 10139287 | A | −3.24 | 0.0460 |
| BCL11B | 4003 | 2614463 | T | 3.51 | 0.0375 |
| ATP10A | 4005 | 11853308 | C | −3.10 | 0.0485 |
| C15ORF41 | 4042 | 16964046 | T | 10.11 | 0.0025 |
| CGNL1 | 4070 | 7182648 | T | 5.08 | 0.0094 |
| CGNL1 | 4072 | 8034215 | G | 4.18 | 0.0146 |
| RORA | 4078 | 12914584 | G | −4.14 | 0.0276 |
| RORA | 4080 | 1657792 | A | 3.67 | 0.0364 |
| TBC1D2B | 4096 | 3803380 | G | −4.30 | 0.0444 |
| A2BP1 | 4123 | 7197955 | C | −3.54 | 0.0262 |
| A2BP1 | 4124 | 7199748 | C | −3.51 | 0.0286 |
| A2BP1 | 4125 | 11077158 | C | −3.51 | 0.0286 |
| A2BP1 | 4129 | 1922593 | T | −4.92 | 0.0152 |
| CDH13 | 4192 | 9926620 | C | 3.61 | 0.0222 |
| TGIF1 | 4275 | 1662805 | G | 5.52 | 0.0101 |
| CHST9 | 4311 | 4093026 | G | −4.26 | 0.0147 |
| CHST9 | 4312 | 720282 | G | −3.86 | 0.0269 |
| CHST9 | 4313 | 8084423 | A | −3.91 | 0.0304 |
| CCBE1 | 4346 | 10503032 | A | 3.58 | 0.0278 |
| CCBE1 | 4347 | 12454887 | G | 3.58 | 0.0278 |
| TXNDC10 | 4371 | 1477990 | A | 6.75 | 0.0350 |
| TXNDC10 | 4372 | 1477992 | G | 6.75 | 0.0350 |
| ATRN | 4390 | 151511 | A | −5.40 | 0.0111 |
| RNF24 | 4394 | 2143235 | A | −7.25 | 0.0361 |
| PLCB1 | 4415 | 2235212 | A | −3.45 | 0.0464 |
| PLCB1 | 4435 | 6056252 | A | 4.16 | 0.0265 |
| PLCB4 | 4436 | 6086690 | G | 4.46 | 0.0115 |
| MACROD2 | 4451 | 2193028 | C | 5.14 | 0.0481 |
| MACROD2 | 4460 | 775122 | A | 4.21 | 0.0339 |
| MAPRE1 | 4491 | 2070090 | T | 5.65 | 0.0275 |
| PTPRT | 4497 | 6065432 | T | −3.36 | 0.0395 |
| PTPRT | 4508 | 4812631 | A | −4.79 | 0.0169 |
| PTPRT | 4509 | 4810366 | C | −4.50 | 0.0258 |
| PTPRT | 4510 | 2017914 | G | −4.50 | 0.0258 |
| ZSWIM3 | 4516 | 6130953 | A | −3.92 | 0.0180 |
| CDH4 | 4537 | 6121844 | C | 9.29 | 0.0321 |
| ASPHD2 | 4572 | 8140344 | A | −3.39 | 0.0246 |
| HPS4 | 4574 | 5761552 | T | 3.33 | 0.0341 |
| EFCAB6 | 4599 | 12628583 | C | −7.08 | 0.0408 |
| EFCAB6 | 4609 | 2401408 | T | −4.60 | 0.0443 |

TABLE 11
Alleles Influencing Discontinuation for Lack of Efficacy for Olanzapine

| | | | | Freq. in | | |
|---|---|---|---|---|---|---|
| | | | | Discon- | | Odds |
| Gene | Seq ID | NCBI RS# | Allele | tinuers | P | Ratio |
| SCP2 | 43 | 13376501 | C | 0.167 | 0.017420 | 4.03 |
| SCP2 | 46 | 17107767 | C | 0.133 | 0.041620 | 3.69 |
| SEC16B | 129 | 869286 | G | 0.367 | 0.028920 | 2.52 |
| USH2A | 161 | 659875 | G | 0.467 | 0.001919 | 3.50 |
| USH2A | 163 | 62906 | G | 0.467 | 0.003684 | 3.23 |
| USH2A | 164 | 386654 | T | 0.467 | 0.004272 | 3.17 |
| USH2A | 166 | 700021 | A | 0.567 | 0.023670 | 2.46 |
| USH2A | 168 | 680410 | G | 0.467 | 0.005763 | 3.05 |
| ESRRG | 172 | 12757165 | G | 0.200 | 0.023670 | 0.35 |
| ESRRG | 173 | 6658528 | T | 0.231 | 0.025770 | 0.34 |
| ESRRG | 175 | 10495027 | A | 0.200 | 0.023670 | 0.35 |
| SLC35F3 | 188 | 538272 | A | 0.133 | 0.018040 | 0.28 |
| SLC35F3 | 189 | 480993 | T | 0.133 | 0.029100 | 0.31 |
| RYR2 | 196 | 12140458 | C | 0.600 | 0.036750 | 2.31 |
| CHRM3 | 216 | 16838637 | G | 0.233 | 0.010800 | 0.32 |
| CHRM3 | 217 | 1867265 | A | 0.233 | 0.025670 | 0.37 |
| CHRM3 | 218 | 2355237 | A | 0.667 | 0.016160 | 2.69 |
| CHRM3 | 224 | 6657343 | A | 0.667 | 0.010980 | 2.84 |
| FEZ2 | 339 | 1179494 | C | 0.167 | 0.033890 | 0.35 |
| SLC8A1 | 347 | 11885401 | C | 0.300 | 0.013010 | 3.10 |
| PRKCE | 382 | 4953288 | T | 0.200 | 0.037970 | 0.38 |
| COMMD1 | 430 | 11125907 | A | 0.179 | 0.019890 | 0.31 |
| AAK1 | 434 | 9789387 | A | 0.200 | 0.010040 | 0.30 |
| AAK1 | 435 | 6546534 | T | 0.100 | 0.005196 | 0.20 |
| AAK1 | 436 | 2311837 | C | 0.167 | 0.001543 | 0.22 |
| AAK1 | 437 | 6712370 | C | 0.100 | 0.003597 | 0.19 |
| AAK1 | 438 | 12713679 | G | 0.167 | 0.004392 | 0.25 |
| AAK1 | 439 | 10779953 | G | 0.133 | 0.009626 | 0.25 |
| AAK1 | 440 | 12471316 | G | 0.200 | 0.005740 | 0.28 |
| CTNNA2 | 466 | 1930 | T | 0.667 | 0.010980 | 2.84 |
| CTNNA2 | 467 | 12464777 | T | 0.667 | 0.016160 | 2.69 |
| RAB3GAP1 | 489 | 935614 | G | 0.200 | 0.013440 | 3.81 |
| ZRANB3 | 492 | 16831601 | T | 0.200 | 0.011320 | 3.92 |
| ZRANB3 | 493 | 4953951 | T | 0.200 | 0.012330 | 3.86 |
| ZRANB3 | 494 | 16831751 | G | 0.200 | 0.019150 | 3.50 |
| ZRANB3 | 495 | 6430579 | T | 0.167 | 0.046440 | 3.13 |
| LRP1B | 511 | 1949871 | C | 0.133 | 0.021220 | 0.29 |
| ARHGAP15 | 542 | 6747717 | T | 0.000 | 0.008333 | 0.00 |
| ARHGAP15 | 544 | 16858944 | A | 0.033 | 0.012420 | 0.11 |
| ARHGAP15 | 552 | 6745691 | G | 0.600 | 0.012320 | 2.75 |
| ARHGAP15 | 555 | 10197021 | T | 0.600 | 0.014310 | 2.67 |
| ARHGAP15 | 556 | 13415550 | T | 0.433 | 0.045800 | 2.25 |
| FMNL2 | 580 | 2577180 | G | 0.300 | 0.023410 | 2.79 |
| PLA2R1 | 606 | 2667023 | C | 0.033 | 0.043040 | 0.16 |
| SCN1A | 621 | 3812718 | C | 0.300 | 0.023380 | 0.39 |
| SCN9A | 627 | 4128577 | T | 0.467 | 0.043790 | 2.25 |
| PARD3B | 659 | 6736058 | G | 0.100 | 0.005196 | 0.20 |
| PARD3B | 660 | 6760872 | C | 0.100 | 0.005196 | 0.20 |
| PARD3B | 661 | 4675490 | G | 0.200 | 0.010040 | 0.30 |
| NRP2 | 673 | 13396083 | C | 0.300 | 0.032720 | 0.41 |
| NRP2 | 674 | 7596827 | T | 0.321 | 0.039530 | 0.41 |
| CUL3 | 685 | 11891006 | G | 0.033 | 0.040830 | 0.15 |
| CUL3 | 687 | 1542789 | A | 0.033 | 0.043040 | 0.16 |
| DNER | 717 | 6743564 | C | 0.567 | 0.012770 | 2.70 |
| CNTN4 | 756 | 1523320 | C | 0.300 | 0.032770 | 0.41 |
| ITPR1 | 774 | 304073 | G | 0.214 | 0.028180 | 0.35 |
| ITPR1 | 775 | 304038 | G | 0.233 | 0.030860 | 0.38 |
| ITPR1 | 777 | 2322830 | T | 0.633 | 0.013910 | 2.71 |
| ATP2B2 | 792 | 6763274 | C | 0.100 | 0.025400 | 0.26 |
| SLC6A6 | 794 | 1156567 | C | 0.000 | 0.033890 | 0.00 |
| ULK4 | 845 | 1495698 | C | 0.533 | 0.045530 | 2.22 |
| FLNB | 913 | 7622687 | A | 0.607 | 0.024250 | 2.54 |
| PTPRG | 939 | 875423 | T | 0.667 | 0.038750 | 2.35 |
| CADPS | 947 | 186236 | C | 0.433 | 0.041620 | 2.29 |
| PRICKLE2 | 958 | 161661 | A | 0.600 | 0.017500 | 2.59 |
| FAM19A1 | 979 | 12486136 | A | 0.633 | 0.010330 | 2.82 |
| FOXP1 | 985 | 2597312 | C | 0.567 | 0.006420 | 2.96 |
| CDGAP | 1021 | 10934491 | C | 0.433 | 0.008361 | 2.94 |
| CDGAP | 1025 | 16829838 | T | 0.267 | 0.036970 | 2.67 |
| KALRN | 1046 | 16835912 | C | 0.700 | 0.005012 | 3.22 |
| CLSTN2 | 1077 | 4683509 | G | 0.067 | 0.036600 | 0.23 |
| SPSB4 | 1085 | 7620622 | A | 0.100 | 0.032370 | 0.28 |
| NLGN1 | 1112 | 16828652 | A | 0.000 | 0.029220 | 0.00 |
| NLGN1 | 1113 | 16828952 | A | 0.200 | 0.027800 | 0.35 |
| NLGN1 | 1114 | 9870677 | C | 0.167 | 0.045810 | 0.37 |
| SLIT2 | 1188 | 10516357 | A | 0.567 | 0.009526 | 2.81 |
| PPARGC1A | 1192 | 10938963 | A | 0.200 | 0.020080 | 0.34 |
| PPARGC1A | 1193 | 8192678 | A | 0.167 | 0.039460 | 0.36 |
| PCDH7 | 1200 | 4611883 | G | 0.233 | 0.004096 | 0.28 |
| PCDH7 | 1201 | 6812005 | G | 0.233 | 0.015450 | 0.34 |
| PCDH7 | 1203 | 12331633 | C | 0.767 | 0.000856 | 4.30 |
| LIMCH1 | 1216 | 4339249 | C | 0.533 | 0.031450 | 2.36 |
| LIMCH1 | 1222 | 10805090 | G | 0.467 | 0.029100 | 2.41 |
| DKK2 | 1306 | 81299 | T | 0.000 | 0.045500 | 0.00 |
| PAPSS1 | 1308 | 4956020 | T | 0.467 | 0.001350 | 3.65 |
| PAPSS1 | 1309 | 12502059 | A | 0.464 | 0.000634 | 4.13 |
| CAMK2D | 1357 | 4834340 | A | 0.600 | 0.010420 | 2.79 |
| CAMK2D | 1358 | 11098193 | T | 0.433 | 0.045800 | 2.25 |
| CAMK2D | 1360 | 13144613 | G | 0.500 | 0.049510 | 2.19 |
| DCLK2 | 1440 | 11727182 | G | 0.633 | 0.037460 | 2.33 |
| CTSO | 1444 | 11946572 | G | 0.500 | 0.028480 | 2.42 |
| FSTL5 | 1460 | 2082669 | G | 0.367 | 0.026200 | 2.58 |
| PALLD | 1492 | 2712118 | C | 0.167 | 0.039460 | 0.36 |
| PALLD | 1494 | 4389538 | G | 0.667 | 0.022930 | 2.55 |
| PALLD | 1496 | 2710827 | A | 0.167 | 0.021100 | 0.32 |
| ODZ3 | 1519 | 10028158 | A | 0.300 | 0.016790 | 2.96 |
| SEMA5A | 1543 | 12520210 | A | 0.233 | 0.041230 | 0.40 |
| EGFLAM | 1588 | 16903920 | G | 0.200 | 0.000669 | 0.21 |
| EGFLAM | 1589 | 2434504 | A | 0.300 | 0.032770 | 0.41 |
| EGFLAM | 1591 | 1428263 | C | 0.167 | 0.045810 | 0.37 |
| EGFLAM | 1593 | 2561111 | T | 0.200 | 0.045500 | 2.88 |
| PDE4D | 1626 | 2910642 | C | 0.233 | 0.018370 | 0.35 |
| PDE4D | 1627 | 2910641 | A | 0.267 | 0.036970 | 2.67 |
| PDE4D | 1632 | 294494 | A | 0.067 | 0.034110 | 0.23 |
| ELOVL7 | 1636 | 6449505 | C | 0.067 | 0.022930 | 0.21 |
| CMYA5 | 1650 | 11960229 | C | 0.400 | 0.000488 | 4.33 |
| GPR98 | 1686 | 4916684 | G | 0.633 | 0.022560 | 2.52 |
| FBXL17 | 1719 | 2193976 | T | 0.321 | 0.039530 | 0.41 |
| KCNN2 | 1730 | 4435855 | A | 0.267 | 0.012550 | 3.27 |
| LOC340069 | 1745 | 919306 | C | 0.233 | 0.027380 | 0.37 |
| LOC340069 | 1746 | 328694 | A | 0.233 | 0.035330 | 0.39 |
| SNCAIP | 1752 | 10066937 | A | 0.367 | 0.016750 | 2.76 |
| SNCAIP | 1754 | 3811879 | C | 0.393 | 0.015460 | 2.82 |
| SNCAIP | 1755 | 1841972 | C | 0.367 | 0.016750 | 2.76 |
| SNCAIP | 1756 | 11241644 | G | 0.367 | 0.028920 | 2.52 |
| SNCAIP | 1757 | 2407209 | A | 0.567 | 0.041230 | 2.26 |
| ADAMTS19 | 1767 | 30651 | G | 0.133 | 0.009170 | 0.25 |
| ADAMTS19 | 1768 | 30645 | T | 0.233 | 0.001087 | 0.24 |
| ADAMTS19 | 1769 | 4835975 | A | 0.107 | 0.003065 | 0.18 |
| TRPC7 | 1775 | 3777145 | T | 0.267 | 0.005054 | 3.83 |
| TRPC7 | 1778 | 950714 | G | 0.267 | 0.012550 | 3.27 |
| TRPC7 | 1779 | 2649691 | A | 0.267 | 0.020420 | 3.00 |
| NEDD9 | 1814 | 8180658 | C | 0.733 | 0.001341 | 3.90 |
| PHACTR1 | 1819 | 9296512 | G | 0.600 | 0.011620 | 2.75 |
| PHACTR1 | 1822 | 4714990 | C | 0.567 | 0.034670 | 2.33 |
| PHACTR1 | 1825 | 202066 | G | 0.200 | 0.047540 | 0.39 |
| ATXN1 | 1835 | 235147 | A | 0.700 | 0.002481 | 3.52 |
| SLC17A1 | 1854 | 1165196 | C | 0.700 | 0.023310 | 2.60 |
| SLC17A1 | 1856 | 1165177 | T | 0.700 | 0.038470 | 2.40 |
| SLC17A3 | 1861 | 1165207 | A | 0.733 | 0.016160 | 2.82 |
| SLC17A3 | 1862 | 1165205 | T | 0.733 | 0.019520 | 2.75 |
| SLC17A2 | 1868 | 442601 | C | 0.533 | 0.008603 | 2.84 |
| SLC17A2 | 1871 | 199739 | T | 0.500 | 0.022460 | 2.49 |
| BTN3A1 | 1872 | 12208788 | T | 0.267 | 0.043820 | 2.59 |
| KLC4 | 1883 | 3793017 | C | 0.033 | 0.002680 | 0.08 |
| TRDN | 1935 | 13190807 | C | 0.500 | 0.027710 | 2.41 |
| TRDN | 1945 | 7452290 | C | 0.233 | 0.031710 | 2.91 |
| TRDN | 1948 | 6931183 | A | 0.233 | 0.031710 | 2.91 |
| TFB1M | 2010 | 9371369 | A | 0.600 | 0.021260 | 2.52 |
| SLC22A3 | 2013 | 12194182 | C | 0.433 | 0.037180 | 2.34 |
| NXPH1 | 2089 | 11489426 | C | 0.600 | 0.025670 | 2.45 |
| SCRN1 | 2133 | 11973169 | T | 0.300 | 0.023410 | 2.79 |
| PLEKHA8 | 2139 | 7806238 | A | 0.300 | 0.010990 | 3.20 |
| ABCA13 | 2211 | 10243683 | T | 0.167 | 0.043370 | 0.36 |
| ABCA13 | 2212 | 3923511 | G | 0.133 | 0.045800 | 0.34 |
| WBSCR17 | 2238 | 6971383 | A | 0.200 | 0.025240 | 0.35 |
| WBSCR17 | 2247 | 7806531 | T | 0.267 | 0.043590 | 0.42 |
| WBSCR17 | 2248 | 4717604 | T | 0.200 | 0.044160 | 0.39 |
| LIMK1 | 2249 | 810532 | G | 0.033 | 0.018760 | 0.13 |
| LIMK1 | 2250 | 2855726 | A | 0.167 | 0.024790 | 0.33 |
| GTF2IRD1 | 2251 | 37612 | C | 0.533 | 0.037970 | 2.29 |
| HIP1 | 2255 | 1167802 | C | 0.033 | 0.010560 | 0.11 |
| MAGI2 | 2285 | 2191806 | C | 0.067 | 0.049510 | 0.25 |
| MAGI2 | 2286 | 10255710 | C | 0.067 | 0.045500 | 0.24 |
| MAGI2 | 2291 | 1528267 | C | 0.033 | 0.037030 | 0.15 |
| ABCB4 | 2353 | 31671 | G | 0.067 | 0.009367 | 0.17 |
| GTPBP10 | 2362 | 11972149 | T | 0.400 | 0.025630 | 2.53 |
| GTPBP10 | 2363 | 17863999 | A | 0.400 | 0.023390 | 2.56 |
| GTPBP10 | 2364 | 13222379 | A | 0.433 | 0.023800 | 2.52 |
| CADPS2 | 2420 | 2074589 | C | 0.200 | 0.044160 | 0.39 |
| SLC13A1 | 2426 | 1404836 | C | 0.100 | 0.010640 | 0.22 |
| SLC13A1 | 2429 | 6963735 | C | 0.133 | 0.012940 | 0.27 |
| SLC13A1 | 2431 | 10253693 | T | 0.567 | 0.004182 | 3.13 |
| SLC13A1 | 2432 | 2204296 | T | 0.500 | 0.016480 | 2.61 |
| EXOC4 | 2459 | 1946303 | T | 0.367 | 0.013940 | 2.85 |
| EXOC4 | 2461 | 6975109 | T | 0.367 | 0.020950 | 2.67 |
| PTPRN2 | 2519 | 4909289 | A | 0.433 | 0.033540 | 2.38 |
| SLC7A2 | 2601 | 7002951 | G | 0.133 | 0.009654 | 5.62 |
| NKAIN3 | 2712 | 10102831 | A | 0.233 | 0.000917 | 5.78 |
| NKAIN3 | 2713 | 10504356 | G | 0.167 | 0.046440 | 3.13 |
| NKAIN3 | 2714 | 10504358 | G | 0.167 | 0.046440 | 3.13 |
| KCNB2 | 2744 | 1972888 | C | 0.067 | 0.005024 | 0.15 |
| KCNB2 | 2745 | 2196904 | C | 0.067 | 0.005024 | 0.15 |
| KCNB2 | 2747 | 1899077 | T | 0.067 | 0.005590 | 0.16 |
| KCNB2 | 2748 | 1440355 | C | 0.067 | 0.008509 | 0.17 |
| KCNB2 | 2749 | 1965805 | G | 0.067 | 0.008509 | 0.17 |
| KCNB2 | 2750 | 2053421 | G | 0.067 | 0.013060 | 0.18 |
| KCNB2 | 2753 | 1026869 | T | 0.600 | 0.021260 | 2.52 |
| GRHL2 | 2774 | 682769 | A | 0.100 | 0.032370 | 0.28 |
| ZFPM2 | 2803 | 16873677 | A | 0.233 | 0.045200 | 2.70 |
| ZFPM2 | 2804 | 16873707 | T | 0.200 | 0.048840 | 2.83 |
| ZFPM2 | 2806 | 7007352 | G | 0.233 | 0.048850 | 2.66 |
| CSMD3 | 2811 | 10088226 | G | 0.133 | 0.000006 | 2.83 |
| CSMD3 | 2812 | 11996690 | A | 0.133 | 0.000006 | 2.75 |
| CSMD3 | 2813 | 7012235 | C | 0.133 | 0.000006 | 2.75 |
| CSMD3 | 2814 | 10505203 | A | 0.100 | 0.008367 | 8.22 |
| FER1L6 | 2834 | 6981430 | G | 0.533 | 0.024230 | 2.46 |
| KIAA1797 | 2960 | 7848159 | G | 0.267 | 0.008146 | 3.53 |
| KIAA1797 | 2962 | 2151002 | A | 0.567 | 0.031480 | 2.36 |
| KIAA1797 | 2964 | 2039390 | A | 0.267 | 0.003735 | 4.06 |
| KIAA1797 | 2965 | 7858506 | G | 0.267 | 0.018600 | 3.05 |
| PIP5K1B | 2995 | 963707 | G | 0.167 | 0.039460 | 0.36 |
| TMC1 | 3041 | 13298704 | C | 0.300 | 0.038290 | 2.55 |
| GNAQ | 3061 | 7048811 | G | 0.400 | 0.032850 | 2.43 |
| DIRAS2 | 3086 | 690232 | A | 0.071 | 0.037160 | 0.23 |
| DIRAS2 | 3087 | 532591 | C | 0.100 | 0.031340 | 0.27 |
| HIATL1 | 3099 | 9409765 | A | 0.333 | 0.038170 | 0.42 |
| HIATL1 | 3100 | 9409552 | G | 0.333 | 0.045500 | 0.44 |
| TTLL11 | 3144 | 13299260 | C | 0.300 | 0.038470 | 0.42 |
| TSC1 | 3179 | 1073123 | G | 0.367 | 0.028920 | 2.52 |
| TSC1 | 3180 | 7858160 | T | 0.367 | 0.032120 | 2.48 |
| TSC1 | 3182 | 7035308 | A | 0.500 | 0.035810 | 2.32 |
| VAV2 | 3186 | 7023551 | G | 0.367 | 0.046930 | 2.32 |
| CACNA1B | 3213 | 10867107 | C | 0.400 | 0.037670 | 2.36 |
| CACNB2 | 3239 | 729245 | A | 0.067 | 0.045500 | 0.24 |
| JMJD1C | 3297 | 10995505 | A | 0.067 | 0.019550 | 0.20 |
| JMJD1C | 3299 | 10761747 | G | 0.067 | 0.021170 | 0.20 |
| JMJD1C | 3301 | 9629895 | A | 0.067 | 0.039190 | 0.23 |
| JMJD1C | 3303 | 2893922 | C | 0.033 | 0.043040 | 0.16 |
| SORCS3 | 3388 | 7072425 | T | 0.000 | 0.032590 | 0.00 |
| VTI1A | 3398 | 7097587 | A | 0.067 | 0.019510 | 0.20 |
| ATRNL1 | 3411 | 10885719 | T | 0.200 | 0.040790 | 0.38 |
| ATRNL1 | 3412 | 4364974 | G | 0.067 | 0.005590 | 0.16 |
| ATRNL1 | 3414 | 2804207 | C | 0.357 | 0.022000 | 0.38 |
| ATRNL1 | 3416 | 10787584 | C | 0.367 | 0.025060 | 0.40 |
| ATRNL1 | 3417 | 2420098 | G | 0.367 | 0.027030 | 0.41 |
| ATRNL1 | 3421 | 180675 | A | 0.036 | 0.030580 | 0.14 |
| ATRNL1 | 3422 | 180635 | T | 0.100 | 0.043730 | 0.30 |
| ATE1 | 3438 | 10510104 | G | 0.000 | 0.039290 | 0.00 |
| ATE1 | 3445 | 4752611 | A | 0.533 | 0.024230 | 2.46 |
| ATE1 | 3449 | 11200251 | T | 0.500 | 0.007236 | 2.94 |
| CTBP2 | 3455 | 9422765 | G | 0.400 | 0.010300 | 2.91 |
| CTBP2 | 3456 | 7896555 | G | 0.400 | 0.010300 | 2.91 |
| STIM1 | 3457 | 7952083 | C | 0.233 | 0.004090 | 0.28 |
| STIM1 | 3458 | 10835249 | G | 0.233 | 0.025670 | 0.37 |
| SPON1 | 3496 | 1876427 | G | 0.100 | 0.037670 | 0.29 |
| SPON1 | 3497 | 2049723 | C | 0.067 | 0.022930 | 0.21 |
| 81.99 mb | 3525 | 1939631 | G | 0.567 | 0.028670 | 2.39 |
| DLG2 | 3553 | 624493 | G | 0.300 | 0.009859 | 3.25 |
| DLG2 | 3554 | 582652 | A | 0.286 | 0.014700 | 3.20 |
| DLG2 | 3555 | 483220 | G | 0.300 | 0.023410 | 2.79 |
| TSPAN9 | 3595 | 10774140 | C | 0.500 | 0.033890 | 2.33 |
| TMEM16B | 3597 | 4930809 | T | 0.433 | 0.021070 | 2.56 |
| ITPR2 | 3638 | 7955049 | G | 0.033 | 0.017100 | 0.12 |
| KCNC2 | 3660 | 10879888 | G | 0.133 | 0.045800 | 0.34 |
| NAV3 | 3675 | 10859738 | A | 0.667 | 0.019110 | 2.63 |
| N4BP2L2 | 3701 | 1081796 | A | 0.400 | 0.001406 | 3.82 |
| N4BP2L2 | 3702 | 208431 | G | 0.393 | 0.011630 | 2.95 |
| NBEA | 3705 | 867503 | C | 0.000 | 0.045500 | 0.00 |
| NBEA | 3709 | 669933 | A | 0.033 | 0.017100 | 0.12 |
| NBEA | 3710 | 2105174 | T | 0.033 | 0.017100 | 0.12 |
| NBEA | 3711 | 9530540 | C | 0.167 | 0.029030 | 0.34 |
| NBEA | 3717 | 1536634 | T | 0.267 | 0.016160 | 0.35 |
| NBEA | 3718 | 2798337 | A | 0.167 | 0.045810 | 0.37 |
| LMO7 | 3741 | 502171 | G | 0.267 | 0.031820 | 0.39 |
| LMO7 | 3742 | 7335067 | A | 0.433 | 0.033540 | 2.38 |
| LMO7 | 3744 | 7321748 | C | 0.100 | 0.001027 | 0.16 |
| LMO7 | 3745 | 7326714 | T | 0.100 | 0.001107 | 0.16 |
| LMO7 | 3746 | 9318373 | A | 0.633 | 0.000265 | 4.30 |
| LMO7 | 3749 | 11617789 | G | 0.000 | 0.006411 | 0.00 |
| LMO7 | 3751 | 9530473 | G | 0.133 | 0.012940 | 0.27 |
| SLAIN1 | 3758 | 9318496 | T | 0.033 | 0.023440 | 0.13 |
| SLAIN1 | 3759 | 1146920 | C | 0.033 | 0.002680 | 0.08 |
| SLAIN1 | 3760 | 10507874 | G | 0.000 | 0.021650 | 0.00 |
| GPC5 | 3767 | 9560813 | T | 0.533 | 0.000872 | 3.76 |
| GPC5 | 3768 | 9560814 | C | 0.533 | 0.001213 | 3.62 |
| GPC5 | 3784 | 10507993 | G | 0.367 | 0.045470 | 2.34 |
| GPC5 | 3786 | 1933197 | C | 0.333 | 0.022930 | 0.39 |
| GPC6 | 3793 | 2209880 | A | 0.400 | 0.018060 | 2.67 |
| GPC6 | 3813 | 9524268 | T | 0.567 | 0.000671 | 3.85 |
| GPC6 | 3820 | 9524371 | C | 0.100 | 0.018410 | 0.25 |
| GPC6 | 3821 | 7337873 | C | 0.133 | 0.039470 | 0.33 |
| NALCN | 3827 | 588083 | C | 0.300 | 0.045020 | 0.43 |
| NPAS3 | 3870 | 1315139 | T | 0.214 | 0.015640 | 0.32 |
| SLC25A21 | 3890 | 1950367 | G | 0.067 | 0.019110 | 10.64 |
| LRFN5 | 3891 | 7148640 | G | 0.467 | 0.018600 | 2.58 |
| RGS6 | 3932 | 11158926 | T | 0.633 | 0.001891 | 3.49 |
| RGS6 | 3933 | 7156200 | C | 0.433 | 0.029870 | 2.42 |
| RGS6 | 3934 | 11623548 | T | 0.333 | 0.045500 | 0.44 |
| RGS6 | 3943 | 2214965 | T | 0.233 | 0.047940 | 0.41 |
| RGS6 | 3950 | 2239221 | C | 0.233 | 0.035330 | 0.39 |
| ATP10A | 4005 | 11853308 | C | 0.233 | 0.007423 | 0.30 |
| ATP10A | 4006 | 7179423 | G | 0.600 | 0.030800 | 2.38 |
| ATP10A | 4007 | 2066707 | G | 0.167 | 0.004267 | 0.25 |
| ATP10A | 4008 | 7178018 | A | 0.533 | 0.037970 | 2.29 |
| MEIS2 | 4050 | 6495883 | G | 0.167 | 0.045810 | 0.37 |
| CGNL1 | 4071 | 4774941 | G | 0.200 | 0.012330 | 3.86 |
| CGNL1 | 4073 | 16977507 | A | 0.167 | 0.049540 | 3.09 |
| CGNL1 | 4076 | 16977597 | T | 0.033 | 0.024940 | 3.86 |
| RORA | 4078 | 12914584 | G | 0.067 | 0.011070 | 0.18 |
| RORA | 4079 | 4774370 | C | 0.067 | 0.028920 | 0.22 |
| RORA | 4082 | 11071548 | G | 0.667 | 0.004725 | 3.17 |
| TBC1D2B | 4096 | 3803380 | G | 0.033 | 0.014590 | 0.12 |
| SH3GL3 | 4108 | 2244838 | C | 0.367 | 0.005772 | 3.26 |
| A2BP1 | 4113 | 17822719 | A | 0.214 | 0.018470 | 0.33 |
| A2BP1 | 4115 | 11077043 | G | 0.321 | 0.028620 | 0.39 |
| A2BP1 | 4128 | 9934782 | G | 0.300 | 0.005930 | 0.32 |
| WWOX | 4158 | 3764342 | C | 0.300 | 0.002226 | 4.10 |
| WWOX | 4160 | 12051258 | T | 0.167 | 0.049540 | 3.09 |
| MPHOSPH6 | 4162 | 7405231 | C | 0.667 | 0.027720 | 2.48 |
| MPHOSPH6 | 4175 | 2967339 | T | 0.300 | 0.034910 | 2.59 |
| MPHOSPH6 | 4178 | 1011433 | C | 0.300 | 0.020520 | 2.87 |
| MPHOSPH6 | 4181 | 2932812 | A | 0.300 | 0.031820 | 2.63 |
| CDH13 | 4205 | 11862993 | A | 0.167 | 0.028590 | 3.55 |
| CA10 | 4239 | 9893317 | A | 0.633 | 0.030830 | 2.41 |
| CA10 | 4240 | 1503058 | A | 0.300 | 0.016270 | 0.36 |
| MSI2 | 4255 | 1007462 | C | 0.233 | 0.002145 | 0.26 |
| PTPRM | 4294 | 11081352 | T | 0.500 | 0.014360 | 2.66 |
| PTPRM | 4295 | 649598 | T | 0.467 | 0.035860 | 2.33 |
| PTPRM | 4296 | 623258 | T | 0.467 | 0.043790 | 2.25 |
| PTPRM | 4298 | 619379 | C | 0.467 | 0.049190 | 2.21 |
| OSBPL1A | 4310 | 275857 | C | 0.100 | 0.025860 | 5.44 |
| CCBE1 | 4338 | 4558500 | C | 0.200 | 0.024430 | 0.35 |
| CCBE1 | 4339 | 1557406 | G | 0.200 | 0.037970 | 0.38 |
| CDH7 | 4353 | 10871590 | A | 0.143 | 0.015220 | 0.27 |
| CDH7 | 4354 | 10460125 | T | 0.133 | 0.033930 | 0.32 |
| CDH7 | 4355 | 7237421 | T | 0.133 | 0.039470 | 0.33 |
| CDH7 | 4356 | 8092259 | G | 0.133 | 0.044400 | 0.33 |
| CDH7 | 4358 | 1484725 | T | 0.133 | 0.045800 | 0.34 |
| DOK6 | 4382 | 9962570 | T | 0.533 | 0.003976 | 3.14 |
| LDLR | 4384 | 2116897 | T | 0.400 | 0.023390 | 2.56 |
| PLCB1 | 4420 | 2294259 | C | 0.133 | 0.039470 | 0.33 |
| PLCB1 | 4435 | 6056252 | A | 0.533 | 0.015830 | 2.62 |
| PLCB4 | 4436 | 6086690 | G | 0.533 | 0.015830 | 2.62 |
| MACROD2 | 4445 | 11908639 | G | 0.667 | 0.004725 | 3.17 |
| MACROD2 | 4446 | 1743471 | A | 0.667 | 0.005888 | 3.09 |
| MACROD2 | 4448 | 459322 | G | 0.643 | 0.011440 | 2.87 |
| MACROD2 | 4449 | 459874 | C | 0.633 | 0.012670 | 2.74 |
| MACROD2 | 4453 | 175805 | T | 0.400 | 0.041920 | 2.32 |
| MACROD2 | 4455 | 6043616 | C | 0.267 | 0.047700 | 2.55 |
| KIF16B | 4484 | 6080359 | C | 0.067 | 0.045500 | 0.24 |
| PTPRT | 4497 | 6065432 | T | 0.467 | 0.003684 | 3.23 |
| PTPRT | 4498 | 746413 | C | 0.633 | 0.007999 | 2.92 |
| PTPRT | 4499 | 1126101 | G | 0.233 | 0.042280 | 0.40 |
| PTPRT | 4500 | 6065434 | T | 0.500 | 0.008152 | 2.89 |
| PTPRT | 4501 | 6016688 | T | 0.433 | 0.002313 | 3.48 |
| CDH4 | 4538 | 6142884 | A | 0.333 | 0.038750 | 0.43 |
| NCAM2 | 4543 | 2826351 | A | 0.567 | 0.006420 | 2.96 |
| NCAM2 | 4545 | 232518 | C | 0.133 | 0.015300 | 0.27 |
| EFCAB6 | 4599 | 12628583 | C | 0.233 | 0.029220 | 2.96 |
| EFCAB6 | 4602 | 470083 | C | 0.367 | 0.008227 | 3.10 |
| EFCAB6 | 4603 | 137733 | T | 0.167 | 0.000139 | 0.16 |
| EFCAB6 | 4606 | 5764214 | C | 0.200 | 0.001341 | 0.23 |
| EFCAB6 | 4609 | 2401408 | T | 0.367 | 0.011470 | 2.94 |
| EFCAB6 | 4612 | 2187887 | G | 0.133 | 0.004437 | 0.22 |
| EFCAB6 | 4613 | 5764302 | G | 0.200 | 0.020750 | 3.45 |
| EFCAB6 | 4614 | 5764310 | C | 0.200 | 0.011320 | 3.92 |

TABLE 12
Alleles Influencing Discontinuation for Lack of Efficacy for Risperidone

| | | | | Freq. in | | |
|---|---|---|---|---|---|---|
| | | | | Discon- | | Odds |
| Gene | Seq ID | NCBI RS# | Allele | tinuers | P | Ratio |
| RP1-21O18.1 | 14 | 1000313 | G | 0.18 | 0.0402 | 0.46 |
| RP1-21O18.1 | 17 | 4661575 | T | 0.30 | 0.0461 | 0.52 |
| LRP8 | 55 | 17108202 | G | 0.50 | 0.0262 | 2.00 |
| DPT | 121 | 6427142 | G | 0.21 | 0.0378 | 2.39 |
| DPT | 125 | 1018453 | C | 0.39 | 0.0311 | 0.51 |
| SEC16B | 126 | 1889981 | T | 0.33 | 0.0087 | 2.58 |
| SEC16B | 128 | 2862300 | G | 0.40 | 0.0023 | 2.76 |
| SEC16B | 129 | 869286 | G | 0.37 | 0.0017 | 2.95 |
| SEC16B | 130 | 1934650 | C | 0.26 | 0.0105 | 2.71 |
| PLA2G4A | 135 | 12128551 | A | 0.12 | 0.0353 | 0.39 |
| PLA2G4A | 137 | 12720662 | T | 0.16 | 0.0449 | 0.46 |
| KCNK2 | 150 | 11120527 | T | 0.37 | 0.0169 | 2.25 |
| USH2A | 161 | 659875 | G | 0.37 | 0.0065 | 2.56 |
| USH2A | 163 | 62906 | G | 0.37 | 0.0093 | 2.40 |
| USH2A | 165 | 10864235 | A | 0.48 | 0.0212 | 2.08 |
| USH2A | 168 | 680410 | G | 0.37 | 0.0096 | 2.43 |
| ESRRG | 179 | 12023399 | G | 0.37 | 0.0265 | 2.10 |
| ESRRG | 182 | 12037068 | C | 0.07 | 0.0247 | 0.30 |
| ESRRG | 184 | 7529655 | A | 0.08 | 0.0301 | 0.34 |
| RYR2 | 196 | 12140458 | C | 0.32 | 0.0423 | 0.52 |
| RYR2 | 215 | 4659819 | T | 0.58 | 0.0419 | 1.88 |
| FMN2 | 234 | 11801848 | C | 0.47 | 0.0073 | 2.34 |
| FMN2 | 236 | 7520065 | G | 0.55 | 0.0078 | 2.29 |
| FMN2 | 237 | 897662 | T | 0.56 | 0.0041 | 2.45 |
| FMN2 | 239 | 1542400 | G | 0.32 | 0.0051 | 0.41 |
| FMN2 | 240 | 4659569 | T | 0.15 | 0.0237 | 0.40 |
| FMN2 | 241 | 10754696 | T | 0.15 | 0.0386 | 0.43 |
| FMN2 | 242 | 10754697 | A | 0.15 | 0.0390 | 0.44 |
| FMN2 | 243 | 16832176 | C | 0.13 | 0.0427 | 0.43 |
| DDEF2 | 283 | 10593 | G | 0.27 | 0.0199 | 2.39 |
| BRE | 325 | 1546029 | C | 0.16 | 0.0500 | 0.47 |
| PLEKHH2 | 359 | 4952676 | G | 0.35 | 0.0465 | 0.53 |
| PLEKHH2 | 360 | 12621654 | T | 0.40 | 0.0232 | 2.15 |
| CCDC85A | 421 | 2869529 | C | 0.45 | 0.0431 | 1.89 |
| COMMD1 | 429 | 7569442 | C | 0.19 | 0.0075 | 0.38 |
| COMMD1 | 430 | 11125907 | A | 0.23 | 0.0096 | 0.41 |
| CTNNA2 | 463 | 318369 | G | 0.29 | 0.0061 | 0.41 |
| CTNNA2 | 464 | 318362 | C | 0.19 | 0.0168 | 0.42 |
| NAP5 | 482 | 13432172 | G | 0.00 | 0.0261 | 0.00 |
| KYNU | 525 | 2278587 | A | 0.00 | 0.0142 | 0.00 |
| KYNU | 529 | 16858404 | T | 0.05 | 0.0164 | 0.24 |
| ARHGAP15 | 559 | 16823114 | A | 0.53 | 0.0004 | 3.03 |
| ARHGAP15 | 561 | 13031917 | C | 0.53 | 0.0007 | 2.92 |
| PKP4 | 596 | 1990815 | C | 0.31 | 0.0333 | 0.50 |
| PKP4 | 597 | 10933492 | A | 0.27 | 0.0490 | 2.09 |
| PKP4 | 600 | 2528582 | G | 0.29 | 0.0231 | 0.48 |
| CERKL | 635 | 4018756 | A | 0.59 | 0.0461 | 1.90 |
| PDE1A | 639 | 11895090 | A | 0.40 | 0.0307 | 2.03 |
| PDE1A | 641 | 6736414 | T | 0.39 | 0.0085 | 2.41 |
| PARD3B | 662 | 7559302 | T | 0.42 | 0.0125 | 2.26 |
| COL4A3 | 699 | 6758076 | C | 0.05 | 0.0164 | 0.24 |
| CNTN4 | 770 | 12497768 | T | 0.60 | 0.0391 | 1.91 |
| ERC2 | 883 | 9810436 | A | 0.37 | 0.0265 | 2.10 |
| ERC2 | 897 | 1878270 | C | 0.27 | 0.0141 | 0.44 |
| ERC2 | 899 | 9881216 | T | 0.27 | 0.0167 | 0.45 |
| ERC2 | 900 | 7633140 | A | 0.29 | 0.0180 | 0.46 |
| ERC2 | 901 | 7627759 | C | 0.31 | 0.0316 | 0.50 |
| IL17RD | 903 | 2035654 | C | 0.08 | 0.0175 | 0.31 |
| IL17RD | 905 | 747089 | T | 0.27 | 0.0109 | 2.64 |
| FHIT | 914 | 2253211 | C | 0.68 | 0.0007 | 2.94 |
| PTPRG | 931 | 7427981 | A | 0.47 | 0.0044 | 2.52 |
| PTPRG | 934 | 1713531 | C | 0.40 | 0.0493 | 0.54 |
| CADPS | 943 | 9843019 | T | 0.10 | 0.0281 | 0.36 |
| CADPS | 949 | 11925708 | A | 0.28 | 0.0409 | 0.50 |
| MAGI1 | 972 | 4234687 | A | 0.15 | 0.0387 | 0.43 |
| MAGI1 | 973 | 17073075 | T | 0.19 | 0.0279 | 0.45 |
| EPHA6 | 1006 | 6438925 | G | 0.03 | 0.0303 | 0.22 |
| CPNE4 | 1059 | 2178385 | A | 0.44 | 0.0422 | 1.91 |
| CPNE4 | 1060 | 2178383 | G | 0.26 | 0.0402 | 0.50 |
| CLSTN2 | 1074 | 7632885 | G | 0.31 | 0.0048 | 0.40 |
| CLSTN2 | 1075 | 4683499 | G | 0.42 | 0.0149 | 0.47 |
| CLSTN2 | 1076 | 6439927 | C | 0.26 | 0.0325 | 0.49 |
| HTR3D | 1128 | 939334 | G | 0.18 | 0.0247 | 0.43 |
| LEPREL1 | 1133 | 9835230 | A | 0.31 | 0.0301 | 2.17 |
| PCDH7 | 1199 | 10517215 | A | 0.05 | 0.0260 | 0.26 |
| PCDH7 | 1202 | 2310225 | A | 0.16 | 0.0500 | 0.47 |
| LIMCH1 | 1223 | 6821712 | C | 0.40 | 0.0224 | 2.11 |
| LIMCH1 | 1224 | 11734372 | T | 0.34 | 0.0352 | 0.51 |
| LPHN3 | 1231 | 995447 | C | 0.02 | 0.0271 | 0.14 |
| PDLIM5 | 1296 | 2452601 | G | 0.29 | 0.0296 | 0.49 |
| PDLIM5 | 1299 | 7690296 | G | 0.29 | 0.0376 | 0.51 |
| PDLIM5 | 1301 | 951613 | A | 0.29 | 0.0390 | 0.51 |
| NDST3 | 1371 | 6534079 | A | 0.08 | 0.0072 | 0.27 |
| NDST3 | 1374 | 6820851 | T | 0.23 | 0.0346 | 0.48 |
| NDST3 | 1376 | 6534084 | C | 0.23 | 0.0437 | 0.49 |
| MAML3 | 1397 | 17051001 | T | 0.47 | 0.0307 | 1.98 |
| POU4F2 | 1427 | 1104532 | A | 0.05 | 0.0414 | 0.29 |
| FSTL5 | 1454 | 4352428 | G | 0.42 | 0.0358 | 1.98 |
| FSTL5 | 1468 | 7699959 | A | 0.40 | 0.0487 | 0.54 |
| FSTL5 | 1471 | 1994770 | A | 0.60 | 0.0060 | 2.35 |
| TLL1 | 1477 | 9637646 | T | 0.24 | 0.0181 | 0.45 |
| PALLD | 1491 | 2319901 | G | 0.58 | 0.0139 | 2.17 |
| ODZ3 | 1514 | 2675532 | C | 0.23 | 0.0242 | 0.46 |
| MYO10 | 1569 | 388887 | T | 0.53 | 0.0255 | 2.02 |
| MYO10 | 1570 | 11750538 | G | 0.24 | 0.0477 | 0.51 |
| MYO10 | 1572 | 890910 | A | 0.22 | 0.0083 | 0.39 |
| CDH10 | 1575 | 3822429 | T | 0.34 | 0.0166 | 0.47 |
| C1QTNF3 | 1580 | 6898170 | G | 0.30 | 0.0096 | 0.43 |
| EGFLAM | 1591 | 1428263 | C | 0.14 | 0.0476 | 0.43 |
| EGFLAM | 1595 | 16903966 | C | 0.22 | 0.0410 | 2.33 |
| ELOVL7 | 1637 | 4700394 | T | 0.68 | 0.0207 | 2.10 |
| VCAN | 1669 | 309559 | T | 0.56 | 0.0189 | 2.07 |
| MEF2C | 1674 | 652660 | G | 0.13 | 0.0427 | 0.43 |
| GPR98 | 1688 | 2366926 | G | 0.19 | 0.0168 | 0.42 |
| GPR98 | 1689 | 1878878 | A | 0.44 | 0.0321 | 1.98 |
| GPR98 | 1691 | 2438359 | T | 0.29 | 0.0024 | 0.37 |
| SEMA6A | 1735 | 254231 | G | 0.42 | 0.0328 | 0.52 |
| SNX24 | 1761 | 10066638 | G | 0.63 | 0.0301 | 1.97 |
| TRPC7 | 1775 | 3777145 | T | 0.02 | 0.0063 | 0.10 |
| TRPC7 | 1776 | 11748766 | C | 0.35 | 0.0082 | 2.48 |
| TRPC7 | 1778 | 950714 | G | 0.02 | 0.0079 | 0.10 |
| TRPC7 | 1779 | 2649691 | A | 0.05 | 0.0219 | 0.25 |
| ODZ2 | 1792 | 1529681 | A | 0.40 | 0.0165 | 2.23 |
| ODZ2 | 1795 | 6555784 | T | 0.13 | 0.0153 | 0.37 |
| ODZ2 | 1797 | 7708354 | G | 0.42 | 0.0103 | 2.31 |
| RNF144B | 1841 | 494248 | C | 0.26 | 0.0326 | 2.27 |
| LRFN2 | 1881 | 846505 | T | 0.31 | 0.0266 | 0.49 |
| SLC22A16 | 1929 | 723685 | C | 0.11 | 0.0431 | 3.23 |
| SLC22A16 | 1930 | 7740547 | C | 0.30 | 0.0487 | 2.03 |
| STX11 | 1995 | 6935462 | A | 0.00 | 0.0460 | 0.00 |
| PARK2 | 2019 | 992037 | T | 0.18 | 0.0316 | 0.45 |
| PARK2 | 2033 | 4708953 | C | 0.68 | 0.0262 | 2.04 |
| PARK2 | 2038 | 10945823 | A | 0.32 | 0.0334 | 2.10 |
| PARK2 | 2039 | 10945825 | A | 0.32 | 0.0404 | 2.04 |
| PARK2 | 2041 | 2105643 | C | 0.34 | 0.0435 | 1.99 |
| PDE10A | 2062 | 7752880 | G | 0.13 | 0.0226 | 0.39 |
| SDK1 | 2081 | 4723505 | T | 0.52 | 0.0118 | 2.21 |
| SDK1 | 2082 | 1044701 | A | 0.24 | 0.0013 | 0.34 |
| NXPH1 | 2084 | 6970999 | G | 0.13 | 0.0088 | 0.34 |
| NXPH1 | 2085 | 2189464 | T | 0.11 | 0.0093 | 0.33 |
| SCIN | 2093 | 1034856 | T | 0.55 | 0.0078 | 2.29 |
| SNX13 | 2102 | 4470902 | T | 0.48 | 0.0441 | 1.88 |
| NPY | 2114 | 16129 | T | 0.35 | 0.0370 | 0.52 |
| NPY | 2115 | 16124 | A | 0.37 | 0.0381 | 0.52 |
| PDE1C | 2153 | 3213709 | G | 0.08 | 0.0036 | 0.25 |
| EEPD1 | 2172 | 196618 | A | 0.24 | 0.0324 | 2.31 |
| ABCA13 | 2190 | 17132163 | T | 0.02 | 0.0158 | 0.12 |
| ABCA13 | 2191 | 12113721 | A | 0.02 | 0.0158 | 0.12 |
| GRB10 | 2215 | 2244347 | C | 0.21 | 0.0010 | 0.32 |
| GRB10 | 2217 | 2244351 | G | 0.33 | 0.0112 | 0.44 |
| GRB10 | 2218 | 2237477 | T | 0.24 | 0.0233 | 0.46 |
| HIP1 | 2264 | 11770686 | T | 0.55 | 0.0085 | 2.29 |
| MAGI2 | 2272 | 1860538 | G | 0.35 | 0.0368 | 0.52 |
| MAGI2 | 2273 | 2075013 | C | 0.35 | 0.0368 | 0.52 |
| MAGI2 | 2277 | 12531031 | T | 0.10 | 0.0199 | 0.34 |
| MAGI2 | 2296 | 10953851 | T | 0.06 | 0.0229 | 0.30 |
| MAGI2 | 2298 | 10269174 | G | 0.29 | 0.0105 | 0.43 |
| SEMA3E | 2346 | 1972459 | C | 0.42 | 0.0274 | 2.04 |
| PPP1R9A | 2372 | 7806202 | G | 0.53 | 0.0063 | 2.37 |
| PPP1R9A | 2373 | 1918482 | A | 0.29 | 0.0025 | 0.37 |
| PPP1R9A | 2374 | 6465460 | G | 0.31 | 0.0090 | 0.42 |
| PPP1R9A | 2376 | 854520 | T | 0.55 | 0.0262 | 1.99 |
| PPP1R9A | 2377 | 854532 | T | 0.52 | 0.0200 | 2.06 |
| PPP1R9A | 2378 | 854535 | C | 0.56 | 0.0335 | 1.93 |
| EXOC4 | 2458 | 10488165 | C | 0.26 | 0.0118 | 0.43 |
| EXOC4 | 2471 | 4731992 | A | 0.29 | 0.0471 | 2.05 |
| DGKI | 2474 | 1731951 | T | 0.40 | 0.0409 | 0.53 |
| CNTNAP2 | 2508 | 1637864 | T | 0.27 | 0.0130 | 2.56 |
| CNTNAP2 | 2509 | 1637840 | T | 0.27 | 0.0130 | 2.56 |
| SGCZ | 2596 | 2898413 | A | 0.21 | 0.0420 | 2.35 |
| PSD3 | 2607 | 7837572 | T | 0.24 | 0.0408 | 2.23 |
| PSD3 | 2610 | 11781914 | G | 0.55 | 0.0012 | 2.77 |
| PSD3 | 2611 | 1492289 | C | 0.58 | 0.0032 | 2.50 |
| UNC5D | 2636 | 2589344 | T | 0.10 | 0.0130 | 0.32 |
| UNC5D | 2643 | 6468338 | T | 0.05 | 0.0383 | 0.28 |
| NKAIN3 | 2686 | 4297032 | T | 0.19 | 0.0268 | 2.64 |
| NKAIN3 | 2687 | 16928845 | A | 0.19 | 0.0268 | 2.64 |
| NKAIN3 | 2688 | 16928883 | C | 0.20 | 0.0378 | 2.46 |
| NKAIN3 | 2689 | 16928902 | C | 0.19 | 0.0429 | 2.40 |
| NKAIN3 | 2703 | 16929381 | T | 0.23 | 0.0269 | 2.46 |
| NKAIN3 | 2704 | 4737609 | A | 0.24 | 0.0324 | 2.31 |
| NKAIN3 | 2710 | 1383154 | A | 0.29 | 0.0231 | 2.29 |
| NKAIN3 | 2724 | 17279355 | G | 0.16 | 0.0458 | 2.59 |
| MMP16 | 2762 | 2248057 | G | 0.56 | 0.0113 | 2.20 |
| GRHL2 | 2775 | 13275653 | C | 0.27 | 0.0366 | 0.50 |
| GRHL2 | 2777 | 4734573 | C | 0.18 | 0.0271 | 0.44 |
| NCALD | 2780 | 2387620 | G | 0.18 | 0.0113 | 0.39 |
| ZFPM2 | 2790 | 7845734 | G | 0.06 | 0.0395 | 0.33 |
| ZFPM2 | 2802 | 6469014 | T | 0.08 | 0.0175 | 0.31 |
| ZFPM2 | 2805 | 11986654 | G | 0.02 | 0.0366 | 0.15 |
| FER1L6 | 2845 | 2069078 | C | 0.22 | 0.0013 | 4.33 |
| FER1L6 | 2846 | 13269044 | G | 0.21 | 0.0081 | 3.18 |
| DDEF1 | 2875 | 2791349 | C | 0.37 | 0.0362 | 2.01 |
| DDEF1 | 2883 | 4504679 | A | 0.45 | 0.0097 | 2.28 |
| ST3GAL1 | 2902 | 2978014 | A | 0.43 | 0.0241 | 2.10 |
| ST3GAL1 | 2903 | 2978015 | T | 0.44 | 0.0321 | 1.98 |
| ST3GAL1 | 2904 | 2945779 | A | 0.46 | 0.0406 | 1.96 |
| SMARCA2 | 2933 | 10116703 | A | 0.37 | 0.0301 | 0.51 |
| PTPRD | 2955 | 1036328 | C | 0.21 | 0.0397 | 0.48 |
| PIP5K1B | 2998 | 1541082 | A | 0.13 | 0.0359 | 3.11 |
| TMC1 | 3043 | 348478 | G | 0.15 | 0.0497 | 0.45 |
| PCSK5 | 3052 | 2789608 | G | 0.26 | 0.0068 | 0.40 |
| ZNF169 | 3097 | 12236219 | T | 0.11 | 0.0463 | 3.18 |
| FKTN | 3111 | 2518128 | A | 0.53 | 0.0264 | 1.99 |
| ABL1 | 3165 | 2855160 | T | 0.48 | 0.0441 | 1.88 |
| CUGBP2 | 3232 | 2938015 | A | 0.15 | 0.0031 | 0.31 |
| CACNB2 | 3242 | 10828879 | A | 0.32 | 0.0290 | 2.14 |
| SORBS1 | 3354 | 2296966 | A | 0.11 | 0.0096 | 5.30 |
| SORBS1 | 3361 | 10882584 | G | 0.12 | 0.0166 | 4.26 |
| VTI1A | 3391 | 3740143 | G | 0.23 | 0.0242 | 0.46 |
| VTI1A | 3393 | 10509963 | A | 0.23 | 0.0126 | 0.42 |
| VTI1A | 3394 | 10885352 | T | 0.23 | 0.0187 | 0.44 |
| GRK5 | 3429 | 10510055 | C | 0.32 | 0.0091 | 0.43 |
| MICAL2 | 3481 | 2270511 | G | 0.19 | 0.0429 | 2.40 |
| SPON1 | 3511 | 11023098 | T | 0.27 | 0.0460 | 0.51 |
| DLG2 | 3528 | 2060147 | G | 0.32 | 0.0109 | 2.47 |
| DLG2 | 3529 | 12275254 | C | 0.48 | 0.0060 | 2.40 |
| DLG2 | 3530 | 983590 | T | 0.29 | 0.0334 | 2.16 |
| DLG2 | 3531 | 11233708 | T | 0.45 | 0.0248 | 2.04 |
| TSPAN9 | 3592 | 4766079 | C | 0.55 | 0.0056 | 2.37 |
| STYK1 | 3613 | 6488316 | T | 0.37 | 0.0214 | 0.48 |
| STYK1 | 3614 | 7350597 | A | 0.39 | 0.0498 | 0.54 |
| LOC729025 | 3619 | 1624759 | G | 0.43 | 0.0165 | 2.20 |
| LOC729025 | 3625 | 3915237 | C | 0.15 | 0.0020 | 0.30 |
| PIK3C2G | 3633 | 11043979 | C | 0.30 | 0.0447 | 0.52 |
| NAV3 | 3668 | 10859620 | G | 0.37 | 0.0484 | 0.54 |
| NAV3 | 3670 | 11107419 | T | 0.19 | 0.0056 | 0.37 |
| NAV3 | 3673 | 1677893 | A | 0.56 | 0.0113 | 2.20 |
| NAV3 | 3675 | 10859738 | A | 0.55 | 0.0249 | 2.01 |
| ATXN2 | 3685 | 616559 | G | 0.27 | 0.0481 | 2.08 |
| TRPC4 | 3730 | 1855253 | A | 0.60 | 0.0487 | 1.86 |
| NPAS3 | 3864 | 11851667 | C | 0.15 | 0.0183 | 0.39 |
| NPAS3 | 3875 | 7144144 | C | 0.58 | 0.0112 | 2.20 |
| NPAS3 | 3877 | 11156807 | T | 0.35 | 0.0465 | 0.53 |
| LRFN5 | 3892 | 10149327 | T | 0.48 | 0.0340 | 1.94 |
| LRFN5 | 3900 | 4143896 | A | 0.37 | 0.0138 | 0.46 |
| LRFN5 | 3902 | 10131436 | A | 0.21 | 0.0121 | 0.41 |
| LRFN5 | 3903 | 17112319 | A | 0.31 | 0.0205 | 0.47 |
| SAMD4A | 3911 | 1307289 | G | 0.12 | 0.0272 | 0.38 |
| SAMD4A | 3912 | 1212968 | C | 0.11 | 0.0412 | 0.41 |
| PPP2R5E | 3922 | 7140704 | G | 0.24 | 0.0477 | 2.16 |
| RPS6KA5 | 3977 | 7156252 | T | 0.40 | 0.0259 | 2.07 |
| CCDC88C | 3981 | 1970911 | A | 0.19 | 0.0045 | 3.72 |
| CCDC88C | 3988 | 10139287 | A | 0.22 | 0.0390 | 0.48 |
| GLDN | 4055 | 17647970 | T | 0.29 | 0.0390 | 0.51 |
| GLDN | 4058 | 2470172 | C | 0.37 | 0.0447 | 0.53 |
| RORA | 4081 | 12594561 | T | 0.53 | 0.0342 | 1.93 |
| RORA | 4083 | 12595483 | G | 0.60 | 0.0243 | 2.02 |
| TBC1D2B | 4093 | 11634607 | T | 0.50 | 0.0198 | 2.07 |
| ARNT2 | 4103 | 11072931 | T | 0.15 | 0.0390 | 0.44 |
| A2BP1 | 4118 | 1155959 | C | 0.29 | 0.0473 | 0.52 |
| CDH13 | 4192 | 9926620 | C | 0.26 | 0.0325 | 0.49 |
| CDH13 | 4199 | 10514574 | G | 0.06 | 0.0098 | 0.26 |
| MSI2 | 4257 | 8066677 | G | 0.18 | 0.0092 | 0.38 |
| SDK2 | 4263 | 7219778 | A | 0.31 | 0.0148 | 0.46 |
| HRNBP3 | 4272 | 7212305 | A | 0.19 | 0.0429 | 2.40 |
| PTPRM | 4289 | 524833 | C | 0.06 | 0.0395 | 0.33 |
| CHST9 | 4314 | 17703962 | G | 0.26 | 0.0376 | 2.20 |
| CCBE1 | 4340 | 2851865 | T | 0.50 | 0.0007 | 2.94 |
| CCBE1 | 4343 | 1560299 | T | 0.65 | 0.0041 | 2.47 |
| CCBE1 | 4344 | 4608425 | A | 0.58 | 0.0011 | 2.77 |
| CDH7 | 4359 | 7244664 | G | 0.11 | 0.0204 | 4.07 |
| CDH7 | 4360 | 8089669 | A | 0.48 | 0.0314 | 1.96 |
| CDH7 | 4369 | 2587427 | A | 0.44 | 0.0240 | 2.06 |
| DOK6 | 4375 | 1550597 | C | 0.62 | 0.0014 | 2.75 |
| DOK6 | 4376 | 1550598 | A | 0.61 | 0.0023 | 2.60 |
| DOK6 | 4377 | 12967871 | A | 0.55 | 0.0044 | 2.43 |
| MBP | 4383 | 470181 | G | 0.24 | 0.0317 | 0.48 |
| ZNF667 | 4386 | 7251105 | G | 0.48 | 0.0441 | 1.88 |
| ZNF544 | 4389 | 12462307 | T | 0.48 | 0.0106 | 2.24 |
| KIF16B | 4461 | 4814465 | T | 0.61 | 0.0238 | 2.03 |
| KIF16B | 4464 | 2144883 | T | 0.52 | 0.0264 | 1.99 |
| KIF16B | 4465 | 2328019 | C | 0.52 | 0.0264 | 1.99 |
| KIF16B | 4472 | 6034464 | A | 0.55 | 0.0339 | 1.93 |
| KIF16B | 4473 | 2876428 | C | 0.53 | 0.0264 | 1.99 |
| KCNB1 | 4517 | 2057077 | C | 0.48 | 0.0237 | 2.04 |
| SNAI1 | 4528 | 6020187 | G | 0.08 | 0.0175 | 0.31 |
| CDH4 | 4538 | 6142884 | A | 0.37 | 0.0447 | 0.53 |
| C21ORF37 | 4540 | 12483129 | C | 0.28 | 0.0066 | 0.41 |
| NCAM2 | 4550 | 973045 | A | 0.61 | 0.0059 | 2.36 |
| NCAM2 | 4551 | 986917 | A | 0.34 | 0.0352 | 0.51 |
| PDE9A | 4564 | 12626774 | C | 0.18 | 0.0071 | 0.37 |
| PDE9A | 4566 | 11702778 | A | 0.60 | 0.0023 | 2.59 |
| ASPHD2 | 4573 | 16982107 | T | 0.10 | 0.0239 | 4.54 |
| PACSIN2 | 4587 | 1071960 | C | 0.19 | 0.0356 | 0.46 |
| EFCAB6 | 4598 | 9614382 | G | 0.44 | 0.0003 | 3.30 |
| EFCAB6 | 4600 | 2374773 | A | 0.48 | 0.0038 | 2.50 |
| EFCAB6 | 4606 | 5764214 | C | 0.55 | 0.0339 | 1.93 |

TABLE 13
Alleles Influencing Discontinuation for Lack of Efficacy for Quetiapine

| | | | | Freq. in | | |
|---|---|---|---|---|---|---|
| | | | | Discon- | | Odds |
| Gene | Seq ID | NCBI RS# | Allele | tinuers | P | Ratio |
| RP1-21O18.1 | 16 | 2221926 | T | 0.19 | 0.04706 | 2.46 |
| EPHB2 | 21 | 7536195 | T | 0.19 | 0.04706 | 2.46 |
| LRP8 | 53 | 2297657 | A | 0.24 | 0.00457 | 0.36 |
| LRP8 | 54 | 12035926 | G | 0.27 | 0.02170 | 0.44 |
| LRP8 | 55 | 17108202 | G | 0.25 | 0.00468 | 0.36 |
| LRP8 | 56 | 11206139 | G | 0.73 | 0.00009 | 3.88 |
| PRKACB | 70 | 648856 | G | 0.13 | 0.02387 | 0.37 |
| PRKACB | 71 | 599686 | T | 0.13 | 0.02995 | 0.39 |
| PRKACB | 72 | 6701486 | A | 0.13 | 0.02995 | 0.39 |
| PRKACB | 74 | 2642186 | G | 0.13 | 0.03741 | 0.40 |
| PTGFRN | 90 | 17036573 | G | 0.08 | 0.00800 | 11.25 |
| PTGFRN | 91 | 12078461 | A | 0.08 | 0.00800 | 11.25 |
| ATF6 | 103 | 16856629 | C | 0.02 | 0.00704 | 0.10 |
| ATF6 | 105 | 10918104 | A | 0.02 | 0.01105 | 0.11 |
| ATF6 | 107 | 2880056 | A | 0.02 | 0.01281 | 0.11 |
| ATF6 | 108 | 12040523 | T | 0.02 | 0.03532 | 0.15 |
| ATF6 | 109 | 2499856 | T | 0.23 | 0.00880 | 3.10 |
| FAM78B | 113 | 10800181 | G | 0.40 | 0.04051 | 2.04 |
| SEC16B | 129 | 869286 | G | 0.29 | 0.02588 | 2.35 |
| SEC16B | 130 | 1934650 | C | 0.18 | 0.00622 | 3.98 |
| MR1 | 134 | 3845422 | A | 0.10 | 0.02526 | 0.33 |
| KCNK2 | 145 | 7547655 | A | 0.38 | 0.00990 | 2.48 |
| KCNK2 | 149 | 1112101 | G | 0.40 | 0.01024 | 2.48 |
| KCNK2 | 150 | 11120527 | T | 0.33 | 0.04745 | 2.06 |
| USH2A | 152 | 4655413 | T | 0.46 | 0.00426 | 2.62 |
| USH2A | 153 | 17025030 | C | 0.46 | 0.00696 | 2.47 |
| ESRRG | 176 | 1984137 | C | 0.58 | 0.02649 | 2.07 |
| ESRRG | 177 | 10218694 | A | 0.23 | 0.02617 | 0.44 |
| ESRRG | 178 | 12088947 | A | 0.23 | 0.02912 | 0.45 |
| RYR2 | 213 | 2685297 | G | 0.40 | 0.03807 | 2.03 |
| PLD5 | 268 | 12063701 | G | 0.15 | 0.03267 | 0.39 |
| DDEF2 | 282 | 10204214 | T | 0.21 | 0.00189 | 4.29 |
| DDEF2 | 283 | 10593 | G | 0.21 | 0.00383 | 3.79 |
| KLHL29 | 296 | 6544949 | G | 0.13 | 0.00720 | 4.98 |
| CRIM1 | 326 | 6757374 | T | 0.17 | 0.01455 | 3.35 |
| CRIM1 | 330 | 3770876 | C | 0.56 | 0.01400 | 2.24 |
| CRIM1 | 331 | 2160367 | C | 0.58 | 0.01239 | 2.27 |
| CRIM1 | 332 | 1017154 | T | 0.50 | 0.04593 | 1.93 |
| SLC8A1 | 351 | 12611602 | C | 0.58 | 0.00890 | 2.37 |
| PRKCE | 380 | 6732900 | T | 0.29 | 0.00898 | 0.41 |
| PRKCE | 381 | 4953270 | G | 0.31 | 0.02235 | 0.46 |
| AAK1 | 440 | 12471316 | G | 0.54 | 0.04224 | 1.94 |
| NAP5 | 483 | 12991216 | A | 0.50 | 0.00267 | 2.72 |
| NAP5 | 487 | 11695364 | T | 0.18 | 0.02907 | 0.42 |
| LRP1B | 523 | 1900936 | T | 0.25 | 0.04561 | 0.48 |
| LRP1B | 524 | 13382235 | G | 0.14 | 0.01726 | 3.94 |
| ARHGAP15 | 554 | 4334442 | C | 0.25 | 0.04842 | 2.25 |
| KIF5C | 563 | 4130558 | A | 0.19 | 0.04706 | 2.46 |
| FMNL2 | 578 | 17327752 | A | 0.15 | 0.04849 | 0.44 |
| FMNL2 | 581 | 10497108 | C | 0.00 | 0.00447 | 0.00 |
| FMNL2 | 582 | 16823807 | G | 0.00 | 0.00447 | 0.00 |
| FMNL2 | 583 | 16823809 | C | 0.00 | 0.00447 | 0.00 |
| FMNL2 | 584 | 10497111 | A | 0.02 | 0.01655 | 0.12 |
| SCN1A | 619 | 4667862 | A | 0.42 | 0.04132 | 2.00 |
| SCN1A | 620 | 6432860 | A | 0.42 | 0.04594 | 1.96 |
| SCN9A | 623 | 4303728 | A | 0.15 | 0.03987 | 2.86 |
| SCN7A | 630 | 3791251 | G | 0.15 | 0.01036 | 3.94 |
| PARD3B | 663 | 919936 | C | 0.27 | 0.03201 | 0.47 |
| TRIP12 | 724 | 6707272 | T | 0.42 | 0.03547 | 2.04 |
| SAG | 732 | 3828307 | T | 0.12 | 0.00222 | 8.74 |
| CNTN6 | 740 | 17271519 | G | 0.44 | 0.04244 | 1.97 |
| CNTN6 | 747 | 3772284 | A | 0.31 | 0.02855 | 0.47 |
| CNTN6 | 748 | 1479530 | G | 0.25 | 0.01613 | 0.42 |
| CNTN6 | 749 | 155900 | T | 0.65 | 0.00160 | 2.87 |
| CNTN6 | 750 | 155390 | G | 0.54 | 0.00161 | 2.84 |
| CNTN6 | 754 | 17038701 | G | 0.00 | 0.01986 | 0.00 |
| CNTN4 | 755 | 10510226 | G | 0.58 | 0.02551 | 2.08 |
| CNTN4 | 764 | 6785626 | A | 0.58 | 0.00711 | 2.42 |
| CNTN4 | 769 | 9823500 | C | 0.33 | 0.04745 | 2.06 |
| ITPR1 | 778 | 3804992 | A | 0.29 | 0.00983 | 0.40 |
| ITPR1 | 779 | 7637793 | T | 0.31 | 0.01401 | 0.43 |
| ITPR1 | 781 | 9880562 | T | 0.25 | 0.03955 | 0.48 |
| ITPR1 | 782 | 3792512 | C | 0.27 | 0.03678 | 2.27 |
| DAZL | 800 | 12233472 | G | 0.37 | 0.04928 | 2.00 |
| RARB | 806 | 1286738 | T | 0.06 | 0.00514 | 0.20 |
| RARB | 808 | 1656463 | A | 0.06 | 0.02341 | 0.26 |
| STAC | 824 | 17035045 | T | 0.31 | 0.03607 | 2.18 |
| STAC | 825 | 4678878 | C | 0.48 | 0.02767 | 2.07 |
| ULK4 | 828 | 4973875 | C | 0.54 | 0.03348 | 2.01 |
| ULK4 | 830 | 9311268 | A | 0.54 | 0.02627 | 2.07 |
| ULK4 | 839 | 7649806 | A | 0.52 | 0.02926 | 2.05 |
| ULK4 | 844 | 1495696 | C | 0.56 | 0.02230 | 2.12 |
| ULK4 | 846 | 9834824 | G | 0.56 | 0.02988 | 2.04 |
| PTPRG | 937 | 1388612 | A | 0.25 | 0.02461 | 2.50 |
| PTPRG | 939 | 875423 | T | 0.35 | 0.01178 | 0.43 |
| PTPRG | 940 | 9813294 | A | 0.58 | 0.01594 | 2.23 |
| PTPRG | 941 | 2242352 | G | 0.44 | 0.02509 | 2.12 |
| CADPS | 946 | 9830865 | A | 0.12 | 0.04366 | 0.39 |
| CADPS | 949 | 11925708 | A | 0.29 | 0.04142 | 0.49 |
| FAM19A1 | 982 | 6801913 | A | 0.42 | 0.00550 | 2.59 |
| GBE1 | 996 | 4411908 | G | 0.24 | 0.04031 | 0.47 |
| GBE1 | 998 | 3860595 | C | 0.25 | 0.04872 | 0.49 |
| CDGAP | 1021 | 10934491 | C | 0.42 | 0.00171 | 2.96 |
| CPNE4 | 1058 | 6806898 | T | 0.17 | 0.04662 | 2.60 |
| EPHB1 | 1071 | 4894251 | A | 0.65 | 0.00909 | 2.39 |
| EPHB1 | 1072 | 750543 | A | 0.65 | 0.01178 | 2.32 |
| SERPINI2 | 1087 | 4955673 | C | 0.37 | 0.02729 | 0.48 |
| SERPINI1 | 1092 | 1492022 | C | 0.28 | 0.02449 | 0.45 |
| TNIK | 1099 | 4955765 | G | 0.54 | 0.04224 | 1.94 |
| TNIK | 1103 | 9861012 | G | 0.46 | 0.03900 | 1.99 |
| PLD1 | 1106 | 1316415 | G | 0.31 | 0.02235 | 0.46 |
| NLGN1 | 1111 | 10936764 | G | 0.40 | 0.01864 | 2.25 |
| NLGN1 | 1119 | 4894645 | T | 0.24 | 0.01686 | 2.75 |
| NLGN1 | 1120 | 12636180 | T | 0.38 | 0.03547 | 2.08 |
| IL1RAP | 1143 | 2193877 | G | 0.10 | 0.01230 | 0.30 |
| LDB2 | 1169 | 1501142 | G | 0.12 | 0.04366 | 0.39 |
| LDB2 | 1171 | 7690190 | A | 0.27 | 0.03088 | 0.47 |
| SLIT2 | 1187 | 621806 | C | 0.21 | 0.01399 | 0.40 |
| SLIT2 | 1189 | 609535 | A | 0.21 | 0.02111 | 0.42 |
| SLIT2 | 1191 | 9992591 | C | 0.21 | 0.04085 | 0.46 |
| CCKAR | 1197 | 2040342 | C | 0.08 | 0.02797 | 0.31 |
| KIAA1239 | 1206 | 17575883 | A | 0.23 | 0.04319 | 2.34 |
| PDLIM5 | 1293 | 2510777 | C | 0.60 | 0.04428 | 1.96 |
| PAPSS1 | 1307 | 2672487 | A | 0.25 | 0.03955 | 0.48 |
| PAPSS1 | 1313 | 4956136 | C | 0.17 | 0.04662 | 2.60 |
| CAMK2D | 1364 | 6853484 | T | 0.21 | 0.00215 | 4.23 |
| CAMK2D | 1365 | 10488959 | C | 0.17 | 0.02586 | 2.95 |
| CAMK2D | 1367 | 7680434 | T | 0.17 | 0.02586 | 2.95 |
| MAML3 | 1387 | 2246759 | G | 0.60 | 0.00827 | 2.39 |
| MAML3 | 1390 | 6831959 | A | 0.38 | 0.04067 | 0.51 |
| INPP4B | 1416 | 17015544 | T | 0.31 | 0.00038 | 4.23 |
| INPP4B | 1417 | 3775654 | G | 0.21 | 0.00215 | 4.23 |
| POU4F2 | 1426 | 10010958 | T | 0.02 | 0.00412 | 0.09 |
| POU4F2 | 1430 | 1979903 | C | 0.02 | 0.04533 | 0.16 |
| FSTL5 | 1450 | 17041096 | C | 0.13 | 0.02590 | 0.38 |
| FSTL5 | 1451 | 7657675 | A | 0.13 | 0.02942 | 0.38 |
| FSTL5 | 1467 | 13117227 | T | 0.25 | 0.00608 | 3.15 |
| FSTL5 | 1472 | 13101933 | T | 0.25 | 0.01610 | 2.69 |
| ODZ3 | 1516 | 6841520 | G | 0.10 | 0.00833 | 7.13 |
| ODZ3 | 1518 | 9312304 | A | 0.37 | 0.03183 | 2.14 |
| DNAH5 | 1549 | 6876673 | T | 0.56 | 0.03635 | 2.01 |
| DNAH5 | 1557 | 895321 | C | 0.44 | 0.02509 | 2.12 |
| DNAH5 | 1558 | 895317 | T | 0.44 | 0.02509 | 2.12 |
| DNAH5 | 1559 | 895316 | G | 0.44 | 0.02509 | 2.12 |
| DNAH5 | 1568 | 339428 | T | 0.37 | 0.02245 | 0.47 |
| EGFLAM | 1590 | 1469421 | A | 0.06 | 0.04830 | 0.30 |
| ITGA1 | 1613 | 1421927 | C | 0.46 | 0.02134 | 2.19 |
| ITGA1 | 1614 | 10940281 | A | 0.44 | 0.04406 | 1.99 |
| ITGA2 | 1618 | 1421937 | C | 0.38 | 0.04744 | 2.05 |
| ELOVL7 | 1637 | 4700394 | T | 0.42 | 0.04081 | 0.51 |
| VCAN | 1663 | 28296 | A | 0.42 | 0.02028 | 2.20 |
| FBXL17 | 1700 | 10463584 | G | 0.25 | 0.01012 | 2.91 |
| PJA2 | 1721 | 11738695 | C | 0.56 | 0.01318 | 2.26 |
| PJA2 | 1722 | 1045706 | A | 0.56 | 0.01628 | 2.21 |
| SEMA6A | 1733 | 17139820 | T | 0.29 | 0.04179 | 2.22 |
| LOC340069 | 1744 | 2561513 | A | 0.62 | 0.02586 | 2.09 |
| LOC340069 | 1746 | 328694 | A | 0.60 | 0.03713 | 1.99 |
| TRPC7 | 1773 | 3734125 | G | 0.42 | 0.01815 | 2.26 |
| ATXN1 | 1835 | 235147 | A | 0.63 | 0.00049 | 3.18 |
| SLC17A4 | 1852 | 1165157 | C | 0.15 | 0.03146 | 0.41 |
| TRDN | 1945 | 7452290 | C | 0.10 | 0.04044 | 0.36 |
| NKAIN2 | 1954 | 342623 | T | 0.06 | 0.03778 | 0.29 |
| NKAIN2 | 1956 | 4897531 | T | 0.06 | 0.03778 | 0.29 |
| NKAIN2 | 1970 | 781487 | C | 0.17 | 0.04280 | 2.64 |
| PDE7B | 1979 | 9385741 | A | 0.08 | 0.00800 | 11.25 |
| PDE7B | 1980 | 6570049 | T | 0.10 | 0.00833 | 7.13 |
| PDE7B | 1981 | 7772608 | G | 0.08 | 0.03174 | 5.50 |
| PDE7B | 1982 | 4382284 | T | 0.21 | 0.00112 | 0.29 |
| PDE7B | 1983 | 6570055 | C | 0.29 | 0.00693 | 0.39 |
| PDE7B | 1984 | 2327665 | G | 0.52 | 0.01748 | 2.18 |
| PDE7B | 1985 | 2018448 | G | 0.52 | 0.01748 | 2.18 |
| PDE7B | 1986 | 11154835 | A | 0.52 | 0.02118 | 2.14 |
| SYNE1 | 2004 | 718527 | A | 0.50 | 0.01101 | 2.32 |
| TFB1M | 2011 | 7775163 | A | 0.23 | 0.00614 | 0.37 |
| PARK2 | 2036 | 1555011 | G | 0.37 | 0.02007 | 2.28 |
| PARK2 | 2049 | 9456810 | C | 0.29 | 0.04545 | 0.50 |
| PDE10A | 2061 | 566759 | G | 0.06 | 0.02341 | 0.26 |
| FERD3L | 2107 | 6967799 | T | 0.14 | 0.01716 | 0.35 |
| FERD3L | 2109 | 6461422 | G | 0.13 | 0.01893 | 0.36 |
| CRHR2 | 2142 | 2190242 | C | 0.37 | 0.01228 | 2.44 |
| CRHR2 | 2143 | 4723003 | T | 0.21 | 0.00721 | 3.38 |
| PDE1C | 2162 | 2079373 | C | 0.04 | 0.01102 | 0.18 |
| CDC2L5 | 2182 | 3735135 | C | 0.00 | 0.02684 | 0.00 |
| CDC2L5 | 2183 | 12531761 | G | 0.00 | 0.02684 | 0.00 |
| CDC2L5 | 2185 | 12536726 | G | 0.00 | 0.02863 | 0.00 |
| ABCA13 | 2206 | 4072503 | G | 0.00 | 0.02684 | 0.00 |
| ABCA13 | 2207 | 1317162 | C | 0.00 | 0.02684 | 0.00 |
| ABCA13 | 2208 | 12113920 | T | 0.00 | 0.02684 | 0.00 |
| ABCA13 | 2210 | 1918602 | T | 0.00 | 0.03652 | 0.00 |
| WBSCR17 | 2228 | 10950221 | A | 0.25 | 0.01269 | 0.41 |
| WBSCR17 | 2234 | 17593300 | G | 0.35 | 0.01932 | 0.46 |
| WBSCR17 | 2236 | 12666361 | A | 0.35 | 0.02424 | 0.47 |
| PCLO | 2333 | 4129230 | T | 0.23 | 0.01020 | 0.39 |
| PCLO | 2334 | 10240976 | T | 0.33 | 0.01650 | 0.44 |
| SEMA3E | 2338 | 2722963 | G | 0.42 | 0.01335 | 2.35 |
| SEMA3E | 2339 | 2713174 | C | 0.50 | 0.04125 | 1.96 |
| SEMA3E | 2340 | 2249188 | G | 0.38 | 0.04895 | 0.52 |
| SEMA3E | 2342 | 17504676 | G | 0.31 | 0.01401 | 0.43 |
| PON1 | 2381 | 3917538 | T | 0.33 | 0.01804 | 2.39 |
| PON1 | 2382 | 2057681 | G | 0.40 | 0.03807 | 2.03 |
| DYNC1I1 | 2389 | 2171555 | A | 0.23 | 0.03512 | 2.42 |
| ZNF3 | 2398 | 7778571 | G | 0.37 | 0.01729 | 2.32 |
| EMID2 | 2402 | 6947185 | C | 0.25 | 0.01964 | 0.42 |
| CUX1 | 2407 | 12537077 | T | 0.52 | 0.01748 | 2.18 |
| CUX1 | 2408 | 2694158 | T | 0.46 | 0.01228 | 2.33 |
| GRM8 | 2433 | 1419508 | A | 0.65 | 0.00083 | 3.05 |
| GRM8 | 2434 | 17627206 | T | 0.63 | 0.00136 | 2.90 |
| GRM8 | 2435 | 954661 | T | 0.63 | 0.00136 | 2.90 |
| GRM8 | 2436 | 2157752 | T | 0.19 | 0.00623 | 0.35 |
| GRM8 | 2437 | 10954112 | C | 0.29 | 0.04545 | 0.50 |
| GRM8 | 2438 | 2283079 | G | 0.62 | 0.00542 | 2.51 |
| GRM8 | 2443 | 2299500 | A | 0.25 | 0.00346 | 0.35 |
| GRM8 | 2445 | 13222700 | T | 0.65 | 0.00056 | 3.17 |
| GRM8 | 2446 | 11763603 | C | 0.65 | 0.00079 | 3.07 |
| GRM8 | 2449 | 6975541 | T | 0.62 | 0.00542 | 2.51 |
| CNTNAP2 | 2495 | 6464776 | C | 0.46 | 0.02746 | 2.09 |
| CNTNAP2 | 2511 | 2530309 | G | 0.27 | 0.00696 | 2.97 |
| CSMD1 | 2549 | 2938236 | T | 0.12 | 0.00734 | 5.78 |
| DLC1 | 2575 | 17788913 | T | 0.56 | 0.04725 | 1.92 |
| DLC1 | 2578 | 536147 | G | 0.06 | 0.00596 | 0.20 |
| SLC7A2 | 2599 | 2248010 | G | 0.48 | 0.02122 | 2.15 |
| UNC5D | 2636 | 2589344 | T | 0.31 | 0.03607 | 2.18 |
| TOX | 2683 | 4738731 | C | 0.60 | 0.00624 | 2.46 |
| TOX | 2684 | 12115074 | C | 0.60 | 0.00749 | 2.42 |
| NKAIN3 | 2690 | 4604422 | C | 0.63 | 0.00333 | 2.65 |
| NKAIN3 | 2692 | 1993125 | C | 0.27 | 0.00753 | 0.39 |
| NKAIN3 | 2693 | 7835901 | C | 0.60 | 0.01415 | 2.24 |
| NKAIN3 | 2696 | 827683 | C | 0.27 | 0.02869 | 2.37 |
| NKAIN3 | 2699 | 1480194 | C | 0.27 | 0.03678 | 2.27 |
| NKAIN3 | 2700 | 16929287 | G | 0.29 | 0.00878 | 2.79 |
| NKAIN3 | 2701 | 936616 | T | 0.29 | 0.01777 | 2.50 |
| NKAIN3 | 2708 | 16929568 | A | 0.17 | 0.04280 | 2.64 |
| NKAIN3 | 2716 | 4739023 | C | 0.38 | 0.04353 | 0.50 |
| NKAIN3 | 2722 | 11989852 | A | 0.14 | 0.02493 | 3.47 |
| NKAIN3 | 2724 | 17279355 | G | 0.13 | 0.02869 | 3.37 |
| KCNB2 | 2754 | 2981104 | C | 0.23 | 0.03512 | 2.42 |
| BAALC | 2785 | 1845430 | A | 0.27 | 0.02098 | 0.44 |
| BAALC | 2786 | 3956319 | T | 0.00 | 0.04448 | 0.00 |
| ADCY8 | 2894 | 4736722 | C | 0.58 | 0.01611 | 2.20 |
| ADCY8 | 2896 | 7461448 | A | 0.04 | 0.04502 | 0.24 |
| COL22A1 | 2912 | 2318340 | T | 0.35 | 0.01777 | 2.35 |
| COL22A1 | 2916 | 2318348 | G | 0.27 | 0.02869 | 2.37 |
| ZC3H3 | 2920 | 7464822 | A | 0.40 | 0.03075 | 2.13 |
| SMARCA2 | 2928 | 7872216 | T | 0.27 | 0.01266 | 2.72 |
| TEK | 2988 | 664461 | C | 0.27 | 0.01966 | 0.44 |
| PIP5K1B | 2997 | 4745375 | T | 0.08 | 0.02797 | 0.31 |
| TRPM3 | 3020 | 1932701 | C | 0.04 | 0.01421 | 0.19 |
| TRPM6 | 3046 | 7859201 | C | 0.52 | 0.00672 | 2.45 |
| TRPM6 | 3048 | 4300062 | C | 0.35 | 0.02477 | 2.24 |
| TRPM6 | 3049 | 7024831 | A | 0.35 | 0.02477 | 2.24 |
| PCSK5 | 3055 | 1029034 | G | 0.48 | 0.00086 | 3.14 |
| NFIL3 | 3091 | 6479339 | T | 0.23 | 0.00993 | 3.05 |
| SVEP1 | 3124 | 963143 | A | 0.26 | 0.01788 | 0.41 |
| TTLL11 | 3146 | 10120546 | C | 0.50 | 0.03239 | 2.02 |
| TTLL11 | 3147 | 12551572 | G | 0.46 | 0.03023 | 2.06 |
| ABCA2 | 3201 | 12337910 | G | 0.25 | 0.00053 | 4.63 |
| ARMC3 | 3250 | 10828389 | T | 0.38 | 0.04099 | 2.04 |
| ARHGAP21 | 3256 | 4415644 | T | 0.37 | 0.04307 | 2.03 |
| ARHGAP21 | 3257 | 7897303 | A | 0.37 | 0.04928 | 2.00 |
| ARHGAP21 | 3258 | 11593521 | C | 0.35 | 0.01247 | 2.47 |
| MYO3A | 3261 | 10828909 | A | 0.38 | 0.04067 | 0.51 |
| MYO3A | 3263 | 11014853 | T | 0.38 | 0.04067 | 0.51 |
| MYO3A | 3267 | 993397 | A | 0.46 | 0.02746 | 2.09 |
| MYO3A | 3280 | 1999240 | C | 0.50 | 0.04892 | 1.91 |
| JMJD1C | 3297 | 10995505 | A | 0.15 | 0.03454 | 0.41 |
| KCNMA1 | 3317 | 10762731 | G | 0.60 | 0.01762 | 2.19 |
| KCNMA1 | 3318 | 10762732 | T | 0.60 | 0.01762 | 2.19 |
| KCNMA1 | 3333 | 2673436 | A | 0.33 | 0.00587 | 0.40 |
| NRG3 | 3342 | 2644208 | T | 0.25 | 0.04263 | 0.47 |
| SORCS3 | 3372 | 10786808 | T | 0.04 | 0.00852 | 0.17 |
| ATRNL1 | 3406 | 11197045 | G | 0.15 | 0.02514 | 0.39 |
| ATRNL1 | 3407 | 11197046 | G | 0.15 | 0.02514 | 0.39 |
| ATRNL1 | 3408 | 2420071 | C | 0.17 | 0.03243 | 0.42 |
| ATE1 | 3446 | 10732824 | A | 0.00 | 0.00915 | 0.00 |
| ATE1 | 3447 | 3750835 | A | 0.00 | 0.01186 | 0.00 |
| ATE1 | 3451 | 11200260 | T | 0.04 | 0.02999 | 0.22 |
| ATE1 | 3452 | 7906462 | A | 0.04 | 0.03826 | 0.23 |
| STIM1 | 3462 | 10835406 | G | 0.50 | 0.03012 | 2.05 |
| STIM1 | 3463 | 10835407 | G | 0.50 | 0.04125 | 1.96 |
| STIM1 | 3464 | 10767767 | T | 0.50 | 0.04301 | 1.96 |
| MICAL2 | 3481 | 2270511 | G | 0.27 | 0.01113 | 2.76 |
| DLG2 | 3537 | 10898192 | G | 0.02 | 0.04533 | 0.16 |
| DLG2 | 3540 | 11233954 | A | 0.02 | 0.02001 | 0.13 |
| DLG2 | 3551 | 7101454 | C | 0.58 | 0.02649 | 2.07 |
| ELMOD1 | 3556 | 6588969 | A | 0.62 | 0.03256 | 2.03 |
| OPCML | 3575 | 7107264 | C | 0.21 | 0.04981 | 2.34 |
| OPCML | 3576 | 1941219 | G | 0.23 | 0.03512 | 2.42 |
| OPCML | 3578 | 6590699 | T | 0.30 | 0.02929 | 2.31 |
| OPCML | 3579 | 6590700 | C | 0.33 | 0.00553 | 2.82 |
| OPCML | 3580 | 6590701 | G | 0.37 | 0.01729 | 2.32 |
| OPCML | 3581 | 7935298 | A | 0.31 | 0.03607 | 2.18 |
| TMEM16B | 3596 | 9645764 | C | 0.10 | 0.00498 | 0.26 |
| TMEM16B | 3597 | 4930809 | T | 0.10 | 0.01395 | 0.30 |
| TMEM16B | 3599 | 11610348 | A | 0.10 | 0.00195 | 14.36 |
| TMEM16B | 3600 | 3782638 | G | 0.10 | 0.00195 | 14.36 |
| TMEM16B | 3601 | 1860961 | G | 0.10 | 0.00195 | 14.36 |
| TMEM16B | 3602 | 12578500 | A | 0.10 | 0.00833 | 7.13 |
| ITPR2 | 3635 | 1049376 | G | 0.13 | 0.01493 | 0.35 |
| ITPR2 | 3636 | 2570 | C | 0.21 | 0.03297 | 0.45 |
| CNOT2 | 3646 | 17107924 | T | 0.19 | 0.04706 | 2.46 |
| CNOT2 | 3651 | 17108018 | G | 0.19 | 0.04706 | 2.46 |
| LMO7 | 3740 | 9573627 | G | 0.46 | 0.04582 | 1.94 |
| LMO7 | 3743 | 9530467 | G | 0.42 | 0.04202 | 0.51 |
| LMO7 | 3749 | 11617789 | G | 0.21 | 0.03308 | 2.54 |
| GPC6 | 3805 | 4085921 | G | 0.23 | 0.03640 | 0.46 |
| GPC6 | 3808 | 4394948 | C | 0.25 | 0.01318 | 0.41 |
| GPC6 | 3811 | 885192 | G | 0.16 | 0.03428 | 0.41 |
| GPC6 | 3813 | 9524268 | T | 0.17 | 0.03524 | 0.43 |
| GPC6 | 3815 | 9524290 | G | 0.06 | 0.02341 | 0.26 |
| GPC6 | 3816 | 9524298 | A | 0.06 | 0.02512 | 0.26 |
| GPC6 | 3817 | 9516323 | T | 0.06 | 0.02740 | 0.27 |
| ITGBL1 | 3839 | 1335589 | T | 0.12 | 0.03133 | 0.37 |
| ITGBL1 | 3847 | 1436261 | C | 0.12 | 0.03498 | 0.38 |
| LRFN5 | 3904 | 1033877 | G | 0.19 | 0.04082 | 0.45 |
| NRXN3 | 3959 | 8022988 | T | 0.27 | 0.03678 | 2.27 |
| MAGEL2 | 4004 | 6576608 | A | 0.29 | 0.01477 | 0.43 |
| RYR3 | 4025 | 2077268 | T | 0.04 | 0.02999 | 0.22 |
| RYR3 | 4032 | 8036377 | A | 0.42 | 0.04594 | 1.96 |
| RYR3 | 4033 | 2043054 | G | 0.38 | 0.04062 | 2.03 |
| C15ORF41 | 4039 | 6495868 | G | 0.27 | 0.01966 | 0.44 |
| TBC1D2B | 4088 | 1108478 | C | 0.10 | 0.02526 | 0.33 |
| TBC1D2B | 4092 | 8030999 | G | 0.23 | 0.03895 | 2.38 |
| A2BP1 | 4122 | 8055711 | T | 0.17 | 0.01639 | 0.38 |
| WWOX | 4153 | 11641213 | G | 0.63 | 0.00580 | 2.51 |
| WWOX | 4154 | 16947095 | A | 0.62 | 0.00946 | 2.36 |
| CDH13 | 4200 | 13337699 | A | 0.35 | 0.03829 | 0.50 |
| USP10 | 4210 | 744839 | T | 0.54 | 0.02481 | 2.09 |
| DNAH9 | 4221 | 12601236 | A | 0.21 | 0.00624 | 0.36 |
| RAB11FIP4 | 4225 | 315431 | T | 0.17 | 0.01292 | 0.37 |
| CA10 | 4251 | 12945099 | C | 0.58 | 0.01047 | 2.36 |
| CACNG4 | 4261 | 9303513 | G | 0.52 | 0.01329 | 2.26 |
| DNAH17 | 4268 | 9302876 | A | 0.40 | 0.00851 | 2.54 |
| DLGAP1 | 4277 | 3915772 | G | 0.08 | 0.04077 | 0.33 |
| KIAA0802 | 4304 | 10502383 | A | 0.15 | 0.02191 | 0.38 |
| KIAA0802 | 4305 | 17407982 | C | 0.15 | 0.02191 | 0.38 |
| KIAA0802 | 4306 | 17408213 | T | 0.16 | 0.03428 | 0.41 |
| CHST9 | 4315 | 9949654 | C | 0.13 | 0.03741 | 0.40 |
| CHST9 | 4316 | 1426879 | C | 0.21 | 0.02111 | 0.42 |
| CHST9 | 4317 | 4800797 | G | 0.21 | 0.02244 | 0.42 |
| RNF24 | 4394 | 2143235 | A | 0.12 | 0.03993 | 3.42 |
| PRNT | 4401 | 7269641 | C | 0.13 | 0.03741 | 0.40 |
| PRNT | 4402 | 6107527 | G | 0.48 | 0.01356 | 2.30 |
| PRNT | 4403 | 6037950 | T | 0.13 | 0.03741 | 0.40 |
| PLCB1 | 4412 | 6055513 | G | 0.25 | 0.00057 | 0.30 |
| PLCB1 | 4432 | 6118375 | C | 0.44 | 0.00111 | 3.06 |
| PLCB1 | 4433 | 4295085 | A | 0.38 | 0.02536 | 0.48 |
| PLCB4 | 4438 | 6056653 | G | 0.21 | 0.03653 | 2.50 |
| JAG1 | 4439 | 3748477 | T | 0.00 | 0.03317 | 0.00 |
| PTPRT | 4492 | 6029924 | A | 0.40 | 0.03807 | 2.03 |
| PTPRT | 4493 | 6016664 | C | 0.42 | 0.04594 | 1.96 |
| PTPRT | 4495 | 4812571 | C | 0.46 | 0.04972 | 1.92 |
| PTPRT | 4496 | 7263976 | C | 0.50 | 0.00816 | 2.40 |
| PTPRT | 4498 | 746413 | C | 0.35 | 0.01178 | 0.43 |
| PTPRT | 4499 | 1126101 | G | 0.60 | 0.00181 | 2.80 |
| PTPRT | 4501 | 6016688 | T | 0.13 | 0.00325 | 0.29 |
| SLC37A1 | 4560 | 401396 | C | 0.23 | 0.04041 | 0.47 |
| RIBC2 | 4616 | 5765398 | A | 0.28 | 0.02449 | 0.45 |
| RIBC2 | 4617 | 2092101 | G | 0.29 | 0.04017 | 0.49 |

TABLE 14
Alleles Influencing Discontinuation for Lack of Efficacy for Perphenazine

| Gene | Seq ID | NCBI RS# | Allele | Freq. in Discontinuers | P | Odds Ratio |
|---|---|---|---|---|---|---|
| EPHB2 | 20 | 10799762 | C | 0.02 | 0.0049860 | 0.09 |
| SCP2 | 41 | 7546714 | T | 0.21 | 0.0474200 | 2.52 |
| LRP8 | 52 | 2297660 | A | 0.57 | 0.0165700 | 2.28 |
| LRP8 | 54 | 12035926 | G | 0.53 | 0.0389800 | 2.00 |
| PRKACB | 73 | 10493750 | C | 0.36 | 0.0414600 | 0.50 |
| PRKACB | 74 | 2642186 | G | 0.44 | 0.0210700 | 2.27 |
| PRKACB | 75 | 11163905 | G | 0.63 | 0.0085300 | 2.48 |
| PRKACB | 76 | 2134648 | C | 0.59 | 0.0217800 | 2.16 |
| PRKACB | 77 | 2134646 | T | 0.59 | 0.0302300 | 2.07 |
| OLFML2B | 110 | 7537366 | T | 0.09 | 0.0464400 | 0.36 |
| SLC35F3 | 191 | 10495346 | T | 0.02 | 0.0227000 | 0.13 |
| FMN2 | 240 | 4659569 | T | 0.36 | 0.0098790 | 2.64 |
| FMN2 | 241 | 10754696 | T | 0.36 | 0.0098790 | 2.64 |
| FMN2 | 242 | 10754697 | A | 0.32 | 0.0414500 | 2.20 |
| PLD5 | 269 | 12061610 | C | 0.29 | 0.0422200 | 0.49 |
| C2ORF46 | 280 | 2914424 | T | 0.18 | 0.0276700 | 3.19 |
| DDEF2 | 283 | 10593 | G | 0.26 | 0.0207800 | 2.70 |
| SLC8A1 | 346 | 417591 | G | 0.09 | 0.0333800 | 0.34 |
| SLC8A1 | 349 | 385561 | G | 0.11 | 0.0391000 | 0.37 |
| C2ORF34 | 368 | 11888605 | A | 0.26 | 0.0066990 | 0.38 |
| C2ORF34 | 369 | 3862996 | C | 0.26 | 0.0066990 | 0.38 |
| C2ORF34 | 370 | 10445928 | C | 0.19 | 0.0077750 | 0.36 |
| C2ORF34 | 371 | 734016 | A | 0.19 | 0.0077750 | 0.36 |
| C2ORF34 | 372 | 6544767 | A | 0.19 | 0.0077750 | 0.36 |
| C2ORF34 | 374 | 3738980 | C | 0.05 | 0.0297800 | 0.26 |
| PRKCE | 379 | 10865208 | C | 0.52 | 0.0087580 | 2.49 |
| PSME4 | 400 | 805438 | A | 0.59 | 0.0154300 | 2.26 |
| PSME4 | 401 | 805391 | T | 0.43 | 0.0453100 | 0.50 |
| CCDC85A | 420 | 1159916 | G | 0.36 | 0.0364900 | 2.16 |
| CCDC85A | 428 | 1030091 | C | 0.00 | 0.0353000 | 0.00 |
| CTNNA2 | 466 | 1930 | T | 0.59 | 0.0217800 | 2.16 |
| NAP5 | 477 | 1437909 | G | 0.28 | 0.0244500 | 0.45 |
| NAP5 | 480 | 2217747 | T | 0.57 | 0.0266600 | 2.11 |
| RAB3GAP1 | 488 | 10174944 | T | 0.23 | 0.0386700 | 2.54 |
| NXPH2 | 500 | 12470031 | G | 0.38 | 0.0209800 | 2.32 |
| KYNU | 532 | 1371516 | C | 0.28 | 0.0307700 | 2.43 |
| KYNU | 533 | 6430001 | A | 0.38 | 00313900 | 2.18 |
| PKP4 | 598 | 3771645 | C | 0.17 | 0.0244400 | 0.40 |
| PKP4 | 601 | 2528593 | A | 0.15 | 0.0300900 | 0.39 |
| PARD3B | 665 | 849221 | T | 0.13 | 0.0245200 | 4.43 |
| COL4A3 | 698 | 6741679 | A | 0.41 | 0.0477000 | 2.01 |
| CNTN4 | 766 | 12496950 | G | 0.48 | 0.0048920 | 2.65 |
| ATP2B2 | 792 | 6763274 | C | 0.33 | 0.0054240 | 3.04 |
| CACNA2D3 | 876 | 10865992 | G | 0.19 | 0.0402600 | 0.45 |
| ERC2 | 878 | 815453 | G | 0.31 | 0.0239400 | 2.43 |
| ERC2 | 880 | 11130482 | C | 0.29 | 0.0270100 | 2.49 |
| IL17RD | 903 | 2035654 | C | 0.19 | 0.0327500 | 2.91 |
| STX19 | 1000 | 9810986 | T | 0.07 | 0.0098710 | 0.36 |
| PLCXD2 | 1017 | 1913495 | T | 0.07 | 0.0069750 | 0.24 |
| STXBP5L | 1026 | 471031 | G | 0.59 | 0.0207900 | 2.18 |
| STXBP5L | 1027 | 657578 | G | 0.59 | 0.0302300 | 2.07 |
| STXBP5L | 1028 | 603635 | T | 0.36 | 0.0198100 | 2.41 |
| STXBP5L | 1030 | 1191296 | A | 0.34 | 0.0221100 | 2.38 |
| STXBP5L | 1032 | 1108170 | T | 0.57 | 0.0462000 | 1.99 |
| STXBP5L | 1034 | 6787048 | T | 0.33 | 0.0324900 | 2.26 |
| STXBP5L | 1035 | 12186062 | C | 0.41 | 0.0329200 | 2.15 |
| RAB6B | 1062 | 1880663 | C | 0.09 | 0.0464400 | 0.36 |
| HTR3D | 1128 | 939334 | G | 0.41 | 0.0038100 | 2.86 |
| HTR3D | 1129 | 6779545 | A | 0.54 | 0.0371400 | 2.04 |
| HTR3D | 1130 | 1000952 | C | 0.24 | 0.0101100 | 0.39 |
| SLIT2 | 1188 | 10516357 | A | 0.41 | 0.0079380 | 2.61 |
| SLIT2 | 1190 | 2168802 | T | 0.31 | 0.0239400 | 2.43 |
| PCDH7 | 1202 | 2310225 | A | 0.38 | 0.0310500 | 2.22 |
| SHROOM3 | 1257 | 344141 | C | 0.28 | 0.0333300 | 0.47 |
| SCD5 | 1273 | 17354301 | T | 0.14 | 0.0397400 | 0.41 |
| CAMK2D | 1364 | 6853484 | T | 0.05 | 0.0244300 | 0.39 |
| CAMK2D | 1365 | 10488959 | C | 0.05 | 0.0244300 | 2.85 |
| CAMK2D | 1366 | 7438925 | G | 0.21 | 0.0474200 | 2.52 |
| MAML3 | 1391 | 11734419 | G | 0.16 | 0.0404600 | 0.42 |
| IL15 | 1403 | 6841939 | A | 0.55 | 0.0078430 | 2.48 |
| IL15 | 1404 | 2139383 | T | 0.34 | 0.0060710 | 0.39 |
| IL15 | 1406 | 4254850 | C | 0.31 | 0.0023750 | 0.35 |
| IL15 | 1407 | 1493015 | A | 0.41 | 0.0477000 | 2.01 |
| IL15 | 1408 | 6821171 | G | 0.19 | 0.0402600 | 0.45 |
| INPP4B | 1410 | 2667101 | G | 0.39 | 0.0458500 | 2.05 |
| INPP4B | 1412 | 336378 | T | 0.05 | 0.0234000 | 2.49 |
| INPP4B | 1413 | 1353603 | A | 0.05 | 0.0275500 | 2.05 |
| INPP4B | 1419 | 7697702 | C | 0.07 | 0.0419200 | 7.31 |
| DCLK2 | 1443 | 4696645 | A | 0.05 | 0.0419800 | 0.28 |
| CTSO | 1446 | 6536124 | A | 0.38 | 0.0381700 | 2.12 |
| FSTL5 | 1450 | 17041096 | C | 0.05 | 0.0102200 | 0.22 |
| FSTL5 | 1451 | 7657675 | A | 0.05 | 0.0162900 | 0.23 |
| FSTL5 | 1455 | 6825091 | A | 0.38 | 0.0106300 | 2.58 |
| FSTL5 | 1456 | 7442468 | C | 0.40 | 0.0145300 | 2.43 |
| FSTL5 | 1463 | 1023957 | C | 0.32 | 0.0171800 | 2.56 |
| FSTL5 | 1464 | 17459954 | T | 0.33 | 0.0115500 | 2.71 |
| FSTL5 | 1465 | 6814301 | T | 0.36 | 0.0243900 | 2.30 |
| TLL1 | 1476 | 2322443 | T | 0.34 | 0.0463700 | 0.50 |
| PALLD | 1487 | 17054309 | A | 0.12 | 0.0453800 | 0.40 |
| SEMA5A | 1541 | 11134354 | A | 0.29 | 0.0088690 | 3.12 |
| SEMA5A | 1542 | 4702625 | G | 0.26 | 0.0346000 | 2.44 |
| CDH10 | 1574 | 7731953 | T | 0.04 | 0.0229400 | 0.20 |
| PDE4D | 1623 | 2936193 | G | 0.07 | 0.0443900 | 0.32 |
| PDE4D | 1635 | 295963 | C | 0.07 | 0.0370100 | 0.31 |
| TNPO1 | 1639 | 6452685 | T | 0.05 | 0.0022400 | 0.17 |
| TNPO1 | 1640 | 6884453 | G | 0.07 | 0.0061530 | 0.23 |
| TNPO1 | 1642 | 12187110 | T | 0.09 | 0.0117600 | 0.28 |
| TNPO1 | 1644 | 2548331 | A | 0.59 | 0.0217800 | 2.16 |
| FCHO2 | 1645 | 478575 | C | 0.31 | 0.0051750 | 0.37 |
| FCHO2 | 1647 | 6895786 | G | 0.17 | 0.0008214 | 0.27 |
| FCHO2 | 1648 | 7727222 | C | 0.17 | 0.0017100 | 0.29 |
| FCHO2 | 1649 | 7709974 | A | 0.17 | 0.0017100 | 0.29 |
| VCAN | 1665 | 11741157 | T | 0.57 | 0.0006516 | 3.21 |
| VCAN | 1666 | 11749904 | C | 0.55 | 0.0011520 | 3.05 |
| VCAN | 1667 | 4558964 | G | 0.12 | 0.0277900 | 0.37 |
| GPR98 | 1681 | 688956 | C | 0.59 | 0.0032750 | 2.71 |
| GPR98 | 1682 | 168743 | G | 0.19 | 0.0330500 | 0.43 |
| GPR98 | 1683 | 16868901 | C | 0.09 | 0.0408800 | 0.35 |
| GPR98 | 1689 | 1878878 | A | 0.50 | 0.0290000 | 2.10 |
| FBXL17 | 1700 | 10463584 | G | 0.26 | 0.0062720 | 3.37 |
| ODZ2 | 1791 | 11952245 | G | 0.40 | 0.0391900 | 2.09 |
| ODZ2 | 1792 | 1529681 | A | 0.23 | 0.0367500 | 0.45 |
| ODZ2 | 1796 | 1560654 | T | 0.14 | 0.0149000 | 0.35 |
| GABRP | 1804 | 732157 | C | 0.60 | 0.0459700 | 1.96 |
| SLC22A23 | 1809 | 11967828 | T | 0.26 | 0.0117900 | 3.00 |
| SLC22A23 | 1810 | 17136440 | T | 0.26 | 0.0207800 | 2.70 |
| SLC22A23 | 1811 | 7747259 | T | 0.26 | 0.0243200 | 2.63 |
| JARID2 | 1826 | 9396578 | T | 0.14 | 0.0172900 | 0.36 |
| RIMS1 | 1902 | 1010326 | A | 0.36 | 0.0098790 | 2.64 |
| SLC22A16 | 1926 | 9400390 | T | 0.21 | 0.0397600 | 0.45 |
| TRDN | 1951 | 7453704 | C | 0.40 | 0.0145300 | 2.43 |
| TRDN | 1952 | 2169092 | T | 0.53 | 0.0199600 | 2.19 |
| PDE7B | 1987 | 6938424 | T | 0.10 | 0.0072410 | 10.96 |
| PDE7B | 1988 | 17065190 | A | 0.07 | 0.0470000 | 7.04 |
| PARK2 | 2024 | 9365311 | C | 0.40 | 0.0459700 | 0.51 |
| PDE10A | 2064 | 7761766 | G | 0.41 | 0.0152800 | 2.37 |
| SDK1 | 2074 | 663466 | A | 0.09 | 0.0464400 | 0.36 |
| SKAP2 | 2118 | 774250 | T | 0.09 | 0.0295100 | 0.33 |
| CREB5 | 2122 | 1544469 | G | 0.16 | 0.0296000 | 0.40 |
| PDE1C | 2154 | 2191876 | T | 0.07 | 0.0113200 | 0.25 |
| PDE1C | 2157 | 17336016 | G | 0.19 | 0.0077750 | 0.36 |
| BMPER | 2167 | 4140982 | A | 0.40 | 0.0268900 | 2.21 |
| WBSCR17 | 2240 | 1859526 | T | 0.33 | 0.0130000 | 2.63 |
| WBSCR17 | 2244 | 12699040 | A | 0.21 | 0.0394900 | 0.45 |
| LIMK1 | 2249 | 810532 | G | 0.05 | 0.0249400 | 0.25 |
| MAGI2 | 2277 | 12531031 | T | 0.21 | 0.0474200 | 2.52 |
| MAGI2 | 2279 | 848913 | C | 0.04 | 0.0142100 | 0.18 |
| MAGI2 | 2286 | 10255710 | C | 0.21 | 0.0243700 | 2.93 |
| MAGI2 | 2300 | 10248584 | G | 0.05 | 0.0249400 | 0.25 |
| MAGI2 | 2301 | 4730829 | C | 0.31 | 0.0147600 | 2.64 |
| PCLO | 2330 | 976714 | T | 0.47 | 0.0202300 | 2.23 |
| SEMA3E | 2342 | 17504676 | G | 0.48 | 0.0278100 | 2.13 |
| ABCB4 | 2349 | 2097937 | G | 0.29 | 0.0428000 | 2.29 |
| PON1 | 2383 | 2299257 | C | 0.26 | 0.0332100 | 0.46 |
| DYNC1I1 | 2390 | 4357216 | C | 0.19 | 0.0289000 | 2.98 |
| GRM8 | 2448 | 17684592 | A | 0.36 | 0.0439300 | 2.10 |
| EXOC4 | 2454 | 1345938 | C | 0.17 | 0.0298100 | 0.42 |
| EXOC4 | 2456 | 7783217 | C | 0.17 | 0.0216500 | 0.40 |
| EXOC4 | 2457 | 6961517 | T | 0.16 | 0.0153600 | 0.37 |
| EXOC4 | 2458 | 10488165 | C | 0.48 | 0.0064380 | 2.58 |
| EXOC4 | 2460 | 972420 | C | 0.69 | 0.0108100 | 2.42 |
| DGKI | 2476 | 12535157 | A | 0.18 | 0.0019130 | 0.29 |
| DGKI | 2477 | 4728414 | C | 0.24 | 0.0197800 | 0.43 |
| DGKI | 2478 | 1528103 | C | 0.24 | 0.0197800 | 0.43 |
| DGKI | 2479 | 10268638 | A | 0.22 | 0.0205800 | 0.42 |
| TBXAS1 | 2483 | 2270163 | G | 0.30 | 0.0340200 | 0.47 |
| CNTNAP2 | 2495 | 6464776 | C | 0.12 | 0.0453800 | 0.40 |
| PTPRN2 | 2522 | 4716883 | G | 0.03 | 0.0282100 | 0.21 |
| PTPRN2 | 2532 | 10265417 | T | 0.41 | 0.0413100 | 0.50 |
| PTPRN2 | 2535 | 2878355 | A | 0.16 | 0.0296000 | 0.40 |
| MCPH1 | 2563 | 3020213 | T | 0.50 | 0.0404600 | 2.00 |
| PSD3 | 2615 | 1506894 | C | 0.02 | 0.0289900 | 0.14 |
| GFRA2 | 2618 | 17427734 | A | 0.26 | 0.0095710 | 0.40 |
| PEBP4 | 2630 | 2457426 | C | 0.43 | 0.0498900 | 0.52 |
| ENTPD4 | 2631 | 9644075 | G | 0.24 | 0.0386800 | 2.46 |
| SLC25A37 | 2632 | 10503726 | C | 0.41 | 0.0000072 | 6.07 |
| SLC25A37 | 2633 | 7826247 | G | 0.43 | 0.0001645 | 4.09 |
| SLC25A37 | 2634 | 11778179 | T | 0.36 | 0.0000056 | 7.95 |
| SFRP1 | 2649 | 10106678 | C | 0.57 | 0.0351300 | 2.03 |
| SNTG1 | 2667 | 2623207 | C | 0.12 | 0.0319900 | 4.16 |
| NKAIN3 | 2715 | 10957255 | G | 0.41 | 0.0099140 | 2.52 |
| NKAIN3 | 2716 | 4739023 | C | 0.41 | 0.0279200 | 0.47 |
| NKAIN3 | 2719 | 4382471 | T | 0.38 | 0.0313900 | 2.18 |
| NKAIN3 | 2720 | 7835051 | G | 0.43 | 0.0266600 | 0.48 |
| NKAIN3 | 2721 | 10100456 | T | 0.38 | 0.0313900 | 2.18 |
| DEPDC2 | 2727 | 10097733 | T | 0.14 | 0.0373800 | 0.40 |
| CRISPLD1 | 2756 | 1455795 | T | 0.03 | 0.0406700 | 0.23 |
| CRISPLD1 | 2758 | 13248650 | G | 0.38 | 0.0065000 | 2.77 |
| GRHL2 | 2770 | 13263539 | G | 0.64 | 0.0112200 | 2.36 |
| GRHL2 | 2771 | 17397776 | T | 0.53 | 0.0183100 | 2.23 |
| GRHL2 | 2772 | 17397811 | A | 0.53 | 0.0199600 | 2.19 |
| NCALD | 2784 | 7813132 | C | 0.33 | 0.0077350 | 2.85 |
| ZFPM2 | 2797 | 7003445 | C | 0.59 | 0.0002598 | 3.61 |
| ZFPM2 | 2799 | 3779776 | G | 0.22 | 0.0250600 | 2.79 |
| ZFPM2 | 2800 | 1442326 | G | 0.45 | 0.0002781 | 3.78 |
| ZFPM2 | 2801 | 12546300 | G | 0.47 | 0.0025700 | 2.96 |
| ZFPM2 | 2807 | 2028553 | A | 0.31 | 0.0087100 | 2.87 |
| SAMD12 | 2823 | 11774993 | G | 0.38 | 0.0275800 | 0.48 |
| SAMD12 | 2824 | 2514588 | T | 0.41 | 0.0229200 | 2.24 |
| SAMD12 | 2825 | 1607924 | G | 0.41 | 0.0229200 | 2.24 |
| SAMD12 | 2826 | 10505340 | A | 0.17 | 0.0146800 | 3.79 |
| FER1L6 | 2836 | 11784115 | A | 0.22 | 0.0383600 | 0.46 |
| FER1L6 | 2842 | 7832499 | C | 0.05 | 0.0355900 | 0.27 |
| FER1L6 | 2844 | 13254498 | A | 0.05 | 0.0355900 | 0.27 |
| MTSS1 | 2855 | 1978661 | A | 0.40 | 0.0179500 | 2.35 |
| COL22A1 | 2908 | 13271565 | T | 0.40 | 0.0268900 | 2.21 |
| COL22A1 | 2915 | 1879047 | T | 0.07 | 0.0039890 | 0.22 |
| SMARCA2 | 2922 | 16937123 | C | 0.19 | 0.0146900 | 3.51 |
| PTPRD | 2942 | 1500326 | T | 0.26 | 0.0473300 | 0.49 |
| PTPRD | 2953 | 4742533 | C | 0.18 | 0.0444300 | 0.44 |
| TRPM6 | 3044 | 2274923 | C | 0.20 | 0.0014970 | 5.88 |
| GNAQ | 3065 | 11145659 | T | 0.31 | 0.0087100 | 2.87 |
| GNAQ | 3068 | 10781482 | T | 0.31 | 0.0105500 | 2.80 |
| GNAQ | 3070 | 6560625 | C | 0.33 | 0.0324900 | 2.26 |
| DAPK1 | 3083 | 1927973 | C | 0.57 | 0.0442700 | 1.98 |
| RP11-35N6.1 | 3109 | 10989207 | T | 0.48 | 0.0346100 | 2.05 |
| SVEP1 | 3123 | 7043896 | A | 0.21 | 0.0394900 | 0.45 |
| SVEP1 | 3125 | 1571236 | T | 0.21 | 0.0435800 | 0.46 |
| STOM | 3142 | 2196311 | G | 0.07 | 0.0416700 | 0.32 |
| ABL1 | 3169 | 3824400 | A | 0.19 | 0.0327500 | 2.91 |
| TSC1 | 3180 | 7858160 | T | 0.26 | 0.0117900 | 3.00 |
| PNPLA7 | 3204 | 10867123 | G | 0.12 | 0.0278700 | 0.37 |
| PITRM1 | 3214 | 7094698 | A | 0.22 | 0.0148200 | 0.40 |
| PITRM1 | 3215 | 3740607 | G | 0.41 | 0.0107600 | 0.42 |
| PITRM1 | 3216 | 2388557 | A | 0.21 | 0.0435800 | 0.46 |
| CUGBP2 | 3231 | 658469 | C | 0.38 | 0.0275800 | 0.48 |
| CACNB2 | 3234 | 7898858 | A | 0.62 | 0.0136900 | 2.31 |
| CDH23 | 3310 | 9415998 | G | 0.59 | 0.0049580 | 2.58 |
| CDH23 | 3311 | 9415047 | C | 0.39 | 0.0322000 | 0.48 |
| CDH23 | 3312 | 3802711 | T | 0.34 | 0.0001127 | 5.09 |
| CDH23 | 3314 | 4747197 | T | 0.38 | 0.0051710 | 2.84 |
| CDH23 | 3315 | 2070968 | A | 0.31 | 0.0026060 | 3.48 |
| KCNMA1 | 3327 | 7897566 | C | 0.50 | 0.0150500 | 2.31 |
| SORBS1 | 3359 | 7079293 | T | 0.26 | 0.0188200 | 0.43 |
| SORBS1 | 3360 | 4918918 | T | 0.25 | 0.0235300 | 0.43 |
| SORBS1 | 3363 | 11188299 | C | 0.12 | 0.0104800 | 6.45 |
| SORBS1 | 3367 | 540746 | T | 0.31 | 0.0298900 | 0.47 |
| SORCS3 | 3372 | 10786808 | T | 0.31 | 0.0026060 | 3.48 |
| SORCS3 | 3382 | 2177744 | C | 0.24 | 0.0386800 | 2.46 |
| VTI1A | 3403 | 11196083 | T | 0.17 | 0.0298100 | 0.42 |
| ATRNL1 | 3420 | 10885833 | C | 0.21 | 0.0068830 | 3.91 |
| ARNTL | 3483 | 7112233 | T | 0.10 | 0.0075890 | 0.29 |
| ARNTL | 3489 | 4414197 | T | 0.14 | 0.0105300 | 0.34 |
| ARNTL | 3490 | 11022753 | C | 0.14 | 0.0149000 | 0.35 |
| ARNTL | 3491 | 10766073 | A | 0.16 | 0.0267100 | 0.39 |
| SPON1 | 3497 | 2049723 | C | 0.33 | 0.0209500 | 2.44 |
| SPON1 | 3514 | 4756787 | C | 0.21 | 0.0270900 | 2.87 |
| NELL1 | 3516 | 12799803 | A | 0.29 | 0.0366100 | 2.34 |
| KCNA4 | 3518 | 605765 | G | 0.56 | 0.0079790 | 2.50 |
| 81.99 mb | 3524 | 1939640 | A | 0.21 | 0.0290900 | 0.43 |
| ELMOD1 | 3559 | 683266 | A | 0.38 | 0.0085320 | 2.65 |
| OPCML | 3575 | 7107264 | C | 0.21 | 0.0474200 | 2.52 |
| OPCML | 3580 | 6590701 | G | 0.33 | 0.0387300 | 2.21 |
| TSPAN9 | 3594 | 4304861 | G | 0.60 | 0.0124100 | 2.32 |
| CNOT2 | 3652 | 3817487 | A | 0.47 | 0.0410600 | 2.01 |
| NBEA | 3703 | 17081356 | G | 0.05 | 0.0244300 | 2.21 |
| TRPC4 | 3729 | 1556541 | C | 0.19 | 0.0019590 | 0.29 |
| LMO7 | 3741 | 502171 | G | 0.52 | 0.0466300 | 1.95 |
| LMO7 | 3742 | 7335067 | A | 0.18 | 0.0096220 | 0.35 |
| LMO7 | 3743 | 9530467 | G | 0.33 | 0.0365100 | 0.49 |
| GPC5 | 3766 | 655169 | T | 0.47 | 0.0076730 | 2.54 |
| GPC5 | 3768 | 9560814 | C | 0.38 | 0.0377100 | 2.14 |
| GPC5 | 3769 | 7987869 | C | 0.57 | 0.0133300 | 2.30 |
| GPC5 | 3788 | 7997883 | G | 0.31 | 0.0406600 | 0.49 |
| GPC5 | 3790 | 2148226 | G | 0.22 | 0.0282600 | 0.44 |
| ITGBL1 | 3838 | 7998372 | T | 0.55 | 0.0443400 | 1.96 |
| ITGBL1 | 3848 | 9300690 | C | 0.60 | 0.0442200 | 1.98 |
| NOVA1 | 3862 | 2144335 | A | 0.11 | 0.0240600 | 0.34 |
| NOVA1 | 3863 | 1950420 | G | 0.12 | 0.0199300 | 0.35 |
| NPAS3 | 3864 | 11851667 | C | 0.21 | 0.0435300 | 0.46 |
| NPAS3 | 3868 | 1579701 | C | 0.28 | 0.0044010 | 0.37 |
| NPAS3 | 3869 | 1579702 | G | 0.28 | 0.0062430 | 0.38 |
| NPAS3 | 3871 | 10133530 | A | 0.22 | 0.0136200 | 3.18 |
| GNG2 | 3906 | 8017705 | A | 0.30 | 0.0404500 | 0.48 |
| PPP2R5E | 3925 | 8008684 | G | 0.09 | 0.0464400 | 0.36 |
| RGS6 | 3949 | 10149207 | G | 0.23 | 0.0154200 | 0.41 |
| CCDC88C | 3982 | 4904764 | G | 0.22 | 0.0282600 | 0.44 |
| RYR3 | 4035 | 11072734 | G | 0.36 | 0.0439300 | 2.10 |
| RYR3 | 4036 | 891343 | T | 0.38 | 0.0456700 | 2.06 |
| MEIS2 | 4049 | 1562804 | T | 0.53 | 0.0094870 | 2.41 |
| RASGRP1 | 4052 | 17574546 | C | 0.09 | 0.0042040 | 0.24 |
| RASGRP1 | 4053 | 16967120 | T | 0.07 | 0.0026770 | 0.20 |
| CGNL1 | 4068 | 4774257 | G | 0.43 | 0.0284600 | 2.15 |
| RORA | 4082 | 11071548 | G | 0.59 | 0.0104800 | 2.39 |
| TBC1D2B | 4097 | 4473152 | G | 0.43 | 0.0163500 | 2.34 |
| TBC1D2B | 4098 | 12903461 | T | 0.43 | 0.0194300 | 2.27 |
| SH3GL3 | 4106 | 11633764 | A | 0.13 | 0.0418200 | 0.39 |
| PCSK6 | 4110 | 11247300 | A | 0.21 | 0.0143000 | 3.32 |
| A2BP1 | 4130 | 2346943 | G | 0.59 | 0.0292500 | 2.10 |
| CRISPLD2 | 4215 | 8049317 | G | 0.53 | 0.0281400 | 2.09 |
| GAS7 | 4219 | 10491088 | C | 0.14 | 0.0051100 | 0.31 |
| DNAH9 | 4220 | 4141189 | A | 0.33 | 0.0268400 | 0.47 |
| CA10 | 4250 | 9303606 | C | 0.64 | 0.0009870 | 3.07 |
| CA10 | 4251 | 12945099 | C | 0.66 | 0.0018140 | 2.90 |
| DLGAP1 | 4278 | 7245298 | G | 0.37 | 0.0454100 | 2.12 |
| ZFP161 | 4282 | 990072 | T | 0.54 | 0.0033140 | 2.78 |
| ZFP161 | 4283 | 11665417 | T | 0.34 | 0.0452600 | 0.50 |
| ZFP161 | 4284 | 9945680 | A | 0.34 | 0.0452600 | 0.50 |
| PTPRM | 4293 | 1866854 | G | 0.45 | 0.0383900 | 2.06 |
| NEDD4L | 4328 | 4940385 | C | 0.53 | 0.0094870 | 2.41 |
| NEDD4L | 4329 | 10513914 | G | 0.38 | 0.0313900 | 2.18 |
| NEDD4L | 4330 | 2075405 | G | 0.34 | 0.0422200 | 2.13 |
| DOK6 | 4381 | 4438406 | C | 0.55 | 0.0011520 | 3.05 |
| DOK6 | 4382 | 9962570 | T | 0.36 | 0.0364900 | 2.16 |
| MACROD2 | 4441 | 994567 | C | 0.38 | 0.0456700 | 2.06 |
| MACROD2 | 4442 | 6135115 | G | 0.29 | 0.0272100 | 2.43 |
| MACROD2 | 4443 | 204606 | G | 0.38 | 0.0456700 | 2.06 |
| MACROD2 | 4444 | 6079395 | G | 0.62 | 0.0275800 | 2.10 |
| SEC23B | 4489 | 963435 | G | 0.47 | 0.0410600 | 2.01 |
| KCNB1 | 4518 | 13042686 | G | 0.02 | 0.0225300 | 0.13 |
| CDH4 | 4531 | 6121764 | G | 0.52 | 0.0311800 | 2.08 |
| CDH4 | 4532 | 1317385 | C | 0.52 | 0.0338600 | 2.05 |
| CDH4 | 4533 | 6089669 | A | 0.40 | 0.0330100 | 2.15 |
| CDH4 | 4536 | 17811544 | G | 0.33 | 0.0365100 | 0.49 |
| CDH4 | 4537 | 6121844 | C | 0.17 | 0.0071560 | 4.69 |
| PDE9A | 4564 | 12626774 | C | 0.19 | 0.0017080 | 0.30 |

TABLE 15
Alleles Influencing Discontinuation for Lack of Efficacy for Ziprasidone

| Gene | Seq ID | NCBI RS# | Allele | Freq. in Discontinuers | P | Odds Ratio |
|---|---|---|---|---|---|---|
| PIK3CD | 1 | 10779729 | A | 0.17 | 0.03768 | 0.33 |
| RP1-21O18.1 | 7 | 6663699 | G | 0.43 | 0.04776 | 2.49 |
| RP1-21O18.1 | 13 | 10803343 | G | 0.07 | 0.03146 | 3.67 |
| AGBL4-C1ORF165 | 28 | 11205538 | C | 0.18 | 0.00368 | 0.22 |
| AGBL4-C1ORF165 | 33 | 4285747 | C | 0.21 | 0.00472 | 0.24 |
| AGBL4-C1ORF165 | 34 | 3121522 | A | 0.20 | 0.00239 | 0.22 |
| AGBL4-C1ORF165 | 35 | 12043418 | T | 0.23 | 0.00649 | 0.27 |
| AGBL4-C1ORF165 | 36 | 2355693 | T | 0.17 | 0.00620 | 0.24 |
| AGBL4-C1ORF165 | 37 | 3122291 | T | 0.30 | 0.00854 | 0.30 |
| KCNN3 | 96 | 6664817 | G | 0.07 | 0.03146 | 4.58 |
| ATF6 | 99 | 1875762 | T | 0.21 | 0.00932 | 5.91 |
| ATF6 | 101 | 10918029 | A | 0.13 | 0.04796 | 5.08 |
| RYR2 | 198 | 637520 | T | 0.60 | 0.04589 | 2.42 |
| RYR2 | 199 | 604735 | A | 0.60 | 0.01027 | 3.14 |
| RYR2 | 214 | 2249847 | C | 0.57 | 0.00892 | 3.24 |
| FMN2 | 244 | 3795677 | A | 0.46 | 0.01047 | 3.40 |
| FMN2 | 245 | 10157105 | G | 0.43 | 0.02019 | 2.95 |
| FMN2 | 246 | 12122068 | C | 0.33 | 0.03497 | 2.90 |
| FMN2 | 247 | 10926223 | C | 0.33 | 0.03497 | 2.90 |
| RGS7 | 255 | 191735 | A | 0.23 | 0.00948 | 0.29 |
| RGS7 | 257 | 4659585 | A | 0.23 | 0.00187 | 0.23 |
| RGS7 | 258 | 10802917 | G | 0.73 | 0.00136 | 4.44 |
| RGS7 | 259 | 670659 | T | 0.50 | 0.02311 | 2.78 |
| C2ORF46 | 274 | 182971 | C | 0.30 | 0.01499 | 3.74 |
| NTSR2 | 288 | 4669767 | C | 0.27 | 0.02258 | 0.34 |
| KLHL29 | 289 | 747345 | A | 0.20 | 0.01128 | 0.28 |
| KLHL29 | 294 | 10172684 | G | 0.17 | 0.01797 | 0.29 |
| KCNK3 | 306 | 1275982 | C | 0.57 | 0.02803 | 2.68 |
| KCNK3 | 307 | 11126666 | A | 0.43 | 0.03939 | 2.65 |
| BRE | 324 | 12468596 | A | 0.33 | 0.04203 | 2.80 |
| CRIM1 | 329 | 3770919 | G | 0.13 | 0.01918 | 0.26 |
| SLC8A1 | 344 | 2110922 | T | 0.53 | 0.02358 | 2.74 |
| PRKCE | 387 | 6748375 | C | 0.57 | 0.01031 | 3.14 |
| PSME4 | 402 | 805399 | A | 0.43 | 0.02019 | 2.95 |
| PSME4 | 403 | 805404 | C | 0.43 | 0.03166 | 2.70 |
| PSME4 | 404 | 805415 | C | 0.43 | 0.03166 | 2.70 |
| PSME4 | 405 | 805319 | G | 0.43 | 0.03166 | 2.70 |
| PSME4 | 406 | 805360 | T | 0.53 | 0.03460 | 2.56 |
| PSME4 | 407 | 3731967 | A | 0.57 | 0.01031 | 3.14 |
| PSME4 | 408 | 10183655 | T | 0.57 | 0.01576 | 2.93 |
| PSME4 | 409 | 17045488 | G | 0.40 | 0.04485 | 2.57 |
| PSME4 | 410 | 1363061 | T | 0.30 | 0.01499 | 3.74 |
| ACYP2 | 411 | 17039547 | C | 0.40 | 0.04485 | 2.57 |
| ACYP2 | 412 | 918357 | G | 0.30 | 0.00854 | 0.30 |
| CTNNA2 | 444 | 1971766 | A | 0.60 | 0.01027 | 3.14 |
| CTNNA2 | 445 | 2566542 | C | 0.29 | 0.01526 | 4.00 |
| NAP5 | 478 | 1437904 | T | 0.13 | 0.01918 | 0.26 |
| NAP5 | 479 | 10176860 | C | 0.07 | 0.02497 | 0.20 |
| NAP5 | 481 | 1434227 | A | 0.07 | 0.00408 | 0.14 |
| NAP5 | 484 | 1975218 | A | 0.03 | 0.03959 | 0.15 |
| NXPH2 | 499 | 11686876 | T | 0.23 | 0.00948 | 0.29 |
| LRP1B | 509 | 10201482 | C | 0.07 | 0.04085 | 0.22 |
| LRP1B | 522 | 11691595 | G | 0.50 | 0.04995 | 2.40 |
| LRP1B | 523 | 1900936 | T | 0.63 | 0.03077 | 2.62 |
| CACNB4 | 571 | 13429172 | C | 0.13 | 0.01369 | 0.25 |
| FMNL2 | 576 | 11684450 | G | 0.57 | 0.04807 | 2.40 |
| FMNL2 | 587 | 1561267 | C | 0.23 | 0.01379 | 4.72 |
| FMNL2 | 588 | 2272535 | G | 0.20 | 0.03335 | 4.00 |
| FMNL2 | 589 | 3817620 | G | 0.20 | 0.03335 | 4.00 |
| PDE1A | 642 | 16823124 | A | 0.13 | 0.04935 | 0.32 |
| PDE1A | 650 | 2887208 | C | 0.57 | 0.03096 | 2.62 |
| ALS2 | 651 | 3219171 | T | 0.17 | 0.00447 | 13.00 |
| ALS2 | 652 | 10469756 | T | 0.20 | 0.00448 | 8.25 |
| ALS2 | 653 | 12470229 | C | 0.13 | 0.04796 | 5.08 |
| NRP2 | 672 | 849565 | C | 0.30 | 0.00729 | 4.43 |
| COL4A3 | 700 | 2178631 | C | 0.63 | 0.02157 | 2.79 |
| COL4A3 | 702 | 4263106 | T | 0.27 | 0.03801 | 3.17 |
| COL4A3 | 703 | 6750210 | C | 0.33 | 0.02476 | 3.17 |
| COL4A3 | 704 | 12468691 | C | 0.30 | 0.01499 | 3.74 |
| COL4A3 | 705 | 6436674 | T | 0.20 | 0.03335 | 4.00 |
| COL4A3 | 708 | 7587228 | C | 0.20 | 0.03335 | 4.00 |
| COL4A3 | 709 | 10188531 | G | 0.20 | 0.03335 | 4.00 |
| TRIP12 | 728 | 17324331 | G | 0.20 | 0.02246 | 0.32 |
| ECEL1 | 729 | 12616972 | C | 0.23 | 0.02700 | 0.34 |
| CNTN6 | 737 | 3772339 | T | 0.57 | 0.03396 | 2.56 |
| CNTN6 | 745 | 2055738 | C | 0.63 | 0.01481 | 2.97 |
| CNTN6 | 746 | 3772290 | T | 0.63 | 0.01481 | 2.97 |
| CNTN4 | 759 | 11915265 | T | 0.53 | 0.02359 | 2.79 |
| CNTN4 | 760 | 1153486 | T | 0.53 | 0.03460 | 2.56 |
| CNTN4 | 761 | 1685456 | C | 0.63 | 0.00912 | 3.23 |
| CNTN4 | 762 | 1502582 | T | 0.30 | 0.04823 | 2.81 |
| CNTN4 | 765 | 9876071 | T | 0.27 | 0.00756 | 0.29 |
| CNTN4 | 766 | 12496950 | G | 0.17 | 0.00895 | 0.25 |
| CNTN4 | 767 | 12494838 | G | 0.13 | 0.02656 | 0.28 |
| FBXL2 | 811 | 4234254 | C | 0.03 | 0.00374 | 0.08 |
| FBXL2 | 812 | 6783644 | G | 0.03 | 0.00636 | 0.09 |
| CLASP2 | 815 | 4629282 | G | 0.03 | 0.00758 | 0.10 |
| ULK4 | 827 | 11707955 | C | 0.67 | 0.02840 | 2.69 |
| CACNA2D3 | 868 | 13082611 | G | 0.20 | 0.01128 | 0.28 |
| CACNA2D3 | 869 | 17140 | T | 0.13 | 0.01918 | 0.26 |
| ERC2 | 877 | 3796232 | G | 0.17 | 0.00189 | 0.20 |
| ERC2 | 893 | 17825409 | C | 0.13 | 0.04935 | 0.32 |
| IL17RD | 904 | 747088 | A | 0.03 | 0.02878 | 0.13 |
| PTPRG | 935 | 4447755 | C | 0.33 | 0.04203 | 2.80 |
| PRICKLE2 | 966 | 4994608 | A | 0.20 | 0.02389 | 0.32 |
| FAM19A1 | 982 | 6801913 | A | 0.40 | 0.03564 | 2.72 |
| FOXP1 | 986 | 2166780 | T | 0.50 | 0.04995 | 2.40 |
| HTR1F | 999 | 1027689 | T | 0.23 | 0.01166 | 4.87 |
| PLCXD2 | 1012 | 13074817 | G | 0.64 | 0.01277 | 3.15 |
| PLCXD2 | 1013 | 13079085 | C | 0.63 | 0.02157 | 2.79 |
| PLCXD2 | 1014 | 6768713 | A | 0.63 | 0.02157 | 2.79 |
| PLCXD2 | 1015 | 12490166 | A | 0.63 | 0.02936 | 2.66 |
| STXBP5L | 1033 | 2331921 | A | 0.57 | 0.02343 | 2.73 |
| STXBP5L | 1035 | 12186062 | C | 0.57 | 0.02102 | 2.80 |
| KALRN | 1040 | 634265 | A | 0.57 | 0.04088 | 2.50 |
| CPNE4 | 1055 | 9289393 | T | 0.57 | 0.04445 | 2.45 |
| CPNE4 | 1056 | 9289395 | G | 0.50 | 0.01500 | 3.00 |
| CPNE4 | 1057 | 876519 | G | 0.63 | 0.04302 | 2.47 |
| CLSTN2 | 1076 | 6439927 | C | 0.47 | 0.01391 | 3.09 |
| TNIK | 1101 | 9824475 | G | 0.43 | 0.04776 | 2.49 |
| SLC2A9 | 1159 | 3733591 | A | 0.07 | 0.04693 | 0.23 |
| LDB2 | 1184 | 13110882 | G | 0.23 | 0.00948 | 0.29 |
| SLIT2 | 1188 | 10516357 | A | 0.47 | 0.03353 | 2.63 |
| LPHN3 | 1232 | 950313 | C | 0.07 | 0.03405 | 0.21 |
| LPHN3 | 1233 | 1124974 | A | 0.07 | 0.03436 | 0.21 |
| SCD5 | 1265 | 6811012 | T | 0.07 | 0.04693 | 0.23 |
| FAM13A1 | 1286 | 1398938 | T | 0.10 | 0.04921 | 7.44 |
| COL25A1 | 1317 | 2305438 | A | 0.23 | 0.01934 | 0.32 |
| ANK2 | 1345 | 967099 | T | 0.57 | 0.01031 | 3.14 |
| ANK2 | 1348 | 362496 | G | 0.47 | 0.00490 | 3.70 |
| ANK2 | 1351 | 29306 | G | 0.40 | 0.01771 | 3.11 |
| ANK2 | 1353 | 29311 | A | 0.40 | 0.01771 | 3.11 |
| MAML3 | 1395 | 11729794 | T | 0.37 | 0.04302 | 0.41 |
| MAML3 | 1397 | 17051001 | T | 0.53 | 0.02358 | 2.74 |
| DCLK2 | 1437 | 10001651 | C | 0.17 | 0.04589 | 0.34 |
| DCLK2 | 1438 | 11735949 | C | 0.23 | 0.01934 | 0.32 |
| FSTL5 | 1461 | 45426 | T | 0.20 | 0.00239 | 0.22 |
| TLL1 | 1478 | 17505781 | T | 0.13 | 0.03639 | 0.30 |
| PALLD | 1503 | 17614715 | T | 0.53 | 0.01774 | 2.92 |
| PALLD | 1504 | 13116423 | T | 0.53 | 0.02056 | 2.83 |
| PALLD | 1505 | 924511 | T | 0.53 | 0.02358 | 2.74 |
| ODZ3 | 1515 | 6820811 | G | 0.50 | 0.00940 | 3.25 |
| AHRR | 1534 | 2251843 | C | 0.30 | 0.04890 | 0.40 |
| SEMA5A | 1535 | 985723 | A | 0.27 | 0.02372 | 3.64 |
| DNAH5 | 1550 | 6554811 | G | 0.63 | 0.01481 | 2.97 |
| DNAH5 | 1551 | 2401810 | G | 0.57 | 0.02803 | 2.68 |
| DNAH5 | 1552 | 2401809 | A | 0.57 | 0.03096 | 2.62 |
| DNAH5 | 1561 | 1530498 | G | 0.17 | 0.03768 | 0.33 |
| ITGA1 | 1606 | 10513001 | G | 0.13 | 0.03639 | 0.30 |
| ITGA1 | 1611 | 923837 | T | 0.70 | 0.03581 | 2.63 |
| PDE4D | 1627 | 2910641 | A | 0.40 | 0.04485 | 2.57 |
| GPR98 | 1685 | 4916681 | T | 0.67 | 0.00934 | 3.23 |
| GPR98 | 1687 | 16868980 | C | 0.60 | 0.00359 | 3.71 |
| GPR98 | 1688 | 2366926 | G | 0.60 | 0.00418 | 3.60 |
| GPR98 | 1691 | 2438359 | T | 0.63 | 0.04302 | 2.47 |
| GPR98 | 1693 | 2950852 | A | 0.17 | 0.01503 | 6.60 |
| FBXL17 | 1702 | 288144 | A | 0.37 | 0.04060 | 2.70 |
| FBXL17 | 1703 | 289227 | C | 0.37 | 0.04060 | 2.70 |
| FBXL17 | 1711 | 7706429 | A | 0.03 | 0.00027 | 0.05 |
| SNX2 | 1758 | 4343835 | C | 0.60 | 0.01547 | 2.94 |
| ODZ2 | 1787 | 2337017 | C | 0.03 | 0.03959 | 0.15 |
| PHACTR1 | 1822 | 4714990 | C | 0.53 | 0.04006 | 2.51 |
| ATXN1 | 1838 | 3812206 | T | 0.47 | 0.03353 | 2.63 |
| RNF144B | 1842 | 9477749 | C | 0.53 | 0.04468 | 2.45 |
| RNF144B | 1843 | 531481 | T | 0.10 | 0.03664 | 0.27 |
| SLC17A1 | 1857 | 4712976 | T | 0.30 | 0.04823 | 2.81 |
| BTNL2 | 1878 | 2076530 | G | 0.27 | 0.03146 | 0.36 |
| RIMS1 | 1903 | 9446563 | G | 0.60 | 0.02274 | 2.75 |
| GABRR2 | 1918 | 282128 | A | 0.33 | 0.01999 | 0.35 |
| SLC22A16 | 1929 | 723685 | C | 0.00 | 0.03653 | 0.00 |
| NKAIN2 | 1957 | 173067 | A | 0.17 | 0.01277 | 0.27 |
| NKAIN2 | 1958 | 163284 | A | 0.20 | 0.02389 | 0.32 |
| NKAIN2 | 1959 | 12195023 | T | 0.10 | 0.01931 | 0.23 |
| NKAIN2 | 1960 | 163295 | A | 0.23 | 0.04101 | 0.37 |
| NKAIN2 | 1971 | 11154271 | C | 0.37 | 0.00515 | 4.20 |
| SYNE1 | 2007 | 4472361 | G | 0.40 | 0.04485 | 2.57 |
| SYNE1 | 2008 | 7776230 | T | 0.40 | 0.04485 | 2.57 |
| CARD11 | 2069 | 4722277 | T | 0.63 | 0.03077 | 2.62 |
| FERD3L | 2103 | 10228726 | G | 0.23 | 0.02613 | 3.84 |
| FERD3L | 2104 | 7780145 | G | 0.37 | 0.01461 | 3.36 |
| CREB5 | 2121 | 6977628 | T | 0.50 | 0.02002 | 3.00 |
| CREB5 | 2126 | 886750 | A | 0.43 | 0.04776 | 2.49 |
| PDE1C | 2155 | 6952633 | G | 0.23 | 0.03717 | 0.36 |
| PDE1C | 2158 | 30568 | C | 0.33 | 0.01104 | 3.75 |
| PDE1C | 2159 | 30589 | G | 0.37 | 0.00079 | 5.98 |
| CDC2L5 | 2186 | 3800802 | T | 0.50 | 0.02977 | 2.67 |
| ABCA13 | 2193 | 17661898 | A | 0.00 | 0.04995 | 0.00 |
| ABCA13 | 2196 | 17548783 | C | 0.29 | 0.02100 | 0.33 |
| WBSCR17 | 2229 | 7777301 | C | 0.67 | 0.00253 | 3.91 |
| WBSCR17 | 2230 | 7808758 | C | 0.67 | 0.00401 | 3.67 |
| WBSCR17 | 2233 | 10950240 | A | 0.70 | 0.01192 | 3.20 |
| PCLO | 2330 | 976714 | T | 0.20 | 0.02246 | 0.32 |
| ABCB4 | 2351 | 31662 | A | 0.00 | 0.04995 | 0.00 |
| ADAM22 | 2360 | 2299199 | G | 0.30 | 0.04943 | 0.40 |
| ZNF3 | 2398 | 7778571 | G | 0.17 | 0.04663 | 0.34 |
| SLC13A1 | 2429 | 6963735 | C | 0.17 | 0.00895 | 0.25 |
| SLC13A1 | 2430 | 2140516 | C | 0.43 | 0.01233 | 3.24 |
| GRM8 | 2451 | 2106183 | T | 0.13 | 0.04935 | 0.32 |
| CNTNAP2 | 2507 | 6958824 | A | 0.33 | 0.00550 | 4.36 |
| CNTNAP2 | 2508 | 1637864 | T | 0.30 | 0.01499 | 3.74 |
| CNTNAP2 | 2509 | 1637840 | T | 0.30 | 0.01499 | 3.74 |
| PTPRN2 | 2519 | 4909289 | A | 0.13 | 0.02396 | 0.27 |
| PTPRN2 | 2526 | 2335836 | C | 0.18 | 0.03901 | 0.33 |
| CSMD1 | 2543 | 13260434 | A | 0.07 | 0.04693 | 0.23 |
| SGCZ | 2580 | 2898389 | C | 0.57 | 0.02343 | 2.73 |
| SGCZ | 2583 | 1551816 | G | 0.27 | 0.02258 | 0.34 |
| SGCZ | 2584 | 4428672 | T | 0.27 | 0.03146 | 0.36 |
| SGCZ | 2585 | 12545852 | C | 0.27 | 0.03146 | 0.36 |
| SGCZ | 2586 | 728845 | A | 0.30 | 0.03569 | 0.38 |
| SGCZ | 2589 | 1903597 | G | 0.27 | 0.03146 | 0.36 |
| SGCZ | 2591 | 1461868 | A | 0.13 | 0.04935 | 0.32 |
| SGCZ | 2592 | 17119601 | G | 0.13 | 0.04935 | 0.32 |
| SLC7A2 | 2597 | 2588233 | C | 0.23 | 0.01488 | 0.30 |
| SLC25A37 | 2635 | 10092233 | G | 0.13 | 0.04796 | 5.08 |
| UNC5D | 2642 | 7826624 | T | 0.07 | 0.03436 | 0.21 |
| SNTG1 | 2665 | 2467203 | A | 0.40 | 0.04485 | 2.57 |
| SNTG1 | 2668 | 2625758 | G | 0.40 | 0.04485 | 2.57 |
| PLAG1 | 2682 | 13273123 | G | 0.32 | 0.01744 | 3.55 |
| DEPDC2 | 2732 | 7007570 | G | 0.54 | 0.02220 | 2.85 |
| BAALC | 2788 | 11785583 | G | 0.07 | 0.00914 | 0.16 |
| BAALC | 2789 | 4734695 | C | 0.17 | 0.01797 | 0.29 |
| CSMD3 | 2815 | 4354335 | G | 0.53 | 0.00617 | 3.59 |
| MTSS1 | 2848 | 17371123 | G | 0.67 | 0.00934 | 3.23 |
| DDEF1 | 2862 | 12546206 | A | 0.53 | 0.03460 | 2.56 |
| DDEF1 | 2865 | 12675390 | C | 0.43 | 0.00396 | 3.96 |
| DDEF1 | 2866 | 1469286 | T | 0.39 | 0.00810 | 3.75 |
| DDEF1 | 2868 | 16904231 | C | 0.37 | 0.01461 | 3.36 |
| DDEF1 | 2870 | 16904239 | A | 0.37 | 0.01461 | 3.36 |
| DDEF1 | 2871 | 16904241 | G | 0.37 | 0.01461 | 3.36 |
| DDEF1 | 2872 | 4733783 | T | 0.37 | 0.01461 | 3.36 |
| DDEF1 | 2873 | 4733788 | G | 0.37 | 0.01461 | 3.36 |
| DDEF1 | 2875 | 2791349 | C | 0.10 | 0.01382 | 0.22 |
| DDEF1 | 2876 | 6470814 | A | 0.37 | 0.01461 | 3.36 |
| DDEF1 | 2877 | 1123205 | G | 0.53 | 0.02358 | 2.74 |
| DDEF1 | 2878 | 11786705 | G | 0.37 | 0.01461 | 3.36 |
| DDEF1 | 2879 | 4574884 | G | 0.10 | 0.01575 | 0.22 |
| DDEF1 | 2880 | 17287702 | T | 0.10 | 0.02672 | 0.25 |
| DDEF1 | 2881 | 16904260 | C | 0.10 | 0.02672 | 0.25 |
| DDEF1 | 2882 | 10086454 | C | 0.13 | 0.03639 | 0.30 |
| ST3GAL1 | 2905 | 17722401 | A | 0.67 | 0.01855 | 2.92 |
| ST3GAL1 | 2906 | 10112722 | G | 0.67 | 0.01999 | 2.86 |
| COL22A1 | 2910 | 4909444 | T | 0.17 | 0.04150 | 0.33 |
| COL22A1 | 2911 | 12674962 | C | 0.23 | 0.00649 | 0.27 |
| COL22A1 | 2918 | 1316335 | A | 0.10 | 0.04978 | 0.29 |
| COL22A1 | 2919 | 9657434 | T | 0.10 | 0.04978 | 0.29 |
| SMARCA2 | 2928 | 7872216 | T | 0.27 | 0.03801 | 3.17 |
| TEK | 2987 | 4601425 | T | 0.50 | 0.02311 | 2.78 |
| TEK | 2989 | 10511803 | C | 0.37 | 0.00799 | 3.80 |
| MAMDC2 | 3012 | 943537 | T | 0.13 | 0.00466 | 0.21 |
| MAMDC2 | 3013 | 4531114 | A | 0.07 | 0.03436 | 0.21 |
| MAMDC2 | 3015 | 11142029 | T | 0.13 | 0.00675 | 0.22 |
| MAMDC2 | 3016 | 1927098 | C | 0.07 | 0.03436 | 0.21 |
| MAMDC2 | 3017 | 2773362 | T | 0.07 | 0.03522 | 0.21 |
| MAMDC2 | 3018 | 3858107 | T | 0.13 | 0.03639 | 0.30 |
| MAMDC2 | 3019 | 1180079 | T | 0.07 | 0.04085 | 0.22 |
| TRPM3 | 3020 | 1932701 | C | 0.00 | 0.04995 | 0.00 |
| TMC1 | 3040 | 1663763 | T | 0.42 | 0.04056 | 2.72 |
| TRPM6 | 3044 | 2274923 | C | 0.18 | 0.03027 | 4.71 |
| PCSK5 | 3053 | 4745488 | C | 0.47 | 0.02199 | 2.84 |
| RP11-35N6.1 | 3109 | 10989207 | T | 0.50 | 0.04995 | 2.40 |
| FKTN | 3115 | 635712 | C | 0.50 | 0.01500 | 3.00 |
| PALM2 | 3116 | 17202273 | C | 0.10 | 0.03664 | 0.27 |
| PALM2 | 3117 | 17202329 | C | 0.10 | 0.03664 | 0.27 |
| PALM2 | 3119 | 7849027 | G | 0.10 | 0.03664 | 0.27 |
| PALM2 | 3121 | 7032940 | A | 0.07 | 0.00516 | 0.14 |
| PALM2 | 3122 | 7036157 | G | 0.07 | 0.00643 | 0.15 |
| SVEP1 | 3128 | 4978939 | C | 0.63 | 0.03077 | 2.62 |
| ZNF618 | 3129 | 4978561 | T | 0.10 | 0.02672 | 0.25 |
| ZNF618 | 3130 | 4979326 | A | 0.10 | 0.03664 | 0.27 |
| DAB2IP | 3143 | 10985431 | T | 0.00 | 0.00727 | 0.00 |
| RALGPS1 | 3152 | 2025955 | T | 0.47 | 0.01391 | 3.09 |
| RALGPS1 | 3153 | 10760473 | G | 0.47 | 0.01391 | 3.09 |
| RALGPS1 | 3155 | 13298677 | G | 0.33 | 0.02037 | 3.28 |
| RALGPS1 | 3157 | 12350252 | A | 0.25 | 0.00393 | 0.25 |
| RALGPS1 | 3158 | 1028866 | G | 0.30 | 0.00569 | 0.28 |
| RALGPS1 | 3159 | 1028865 | T | 0.27 | 0.00756 | 0.29 |
| ABL1 | 3170 | 7021981 | T | 0.23 | 0.02613 | 3.84 |
| ABL1 | 3171 | 11792273 | G | 0.23 | 0.02613 | 3.84 |
| NOTCH1 | 3200 | 10870085 | T | 0.10 | 0.04978 | 0.29 |
| ABCA2 | 3201 | 12337910 | G | 0.00 | 0.01981 | 0.00 |
| PITRM1 | 3217 | 4242746 | T | 0.47 | 0.03567 | 2.63 |
| CACNB2 | 3240 | 10828726 | G | 0.53 | 0.04946 | 2.39 |
| MYO3A | 3262 | 10741104 | C | 0.70 | 0.02563 | 2.79 |
| MYO3A | 3264 | 10828912 | A | 0.70 | 0.02563 | 2.79 |
| MYO3A | 3285 | 12764197 | G | 0.07 | 0.03005 | 0.21 |
| MYO3A | 3287 | 3781117 | C | 0.07 | 0.01800 | 0.18 |
| CDH23 | 3308 | 1227051 | C | 0.38 | 0.03748 | 2.90 |
| KCNMA1 | 3322 | 1907729 | T | 0.03 | 0.03959 | 0.15 |
| KCNMA1 | 3328 | 10824519 | T | 0.30 | 0.02563 | 0.36 |
| KCNMA1 | 3329 | 10824520 | T | 0.30 | 0.03569 | 0.38 |
| KCNMA1 | 3332 | 11002137 | C | 0.30 | 0.03569 | 0.38 |
| NRG3 | 3339 | 17099789 | G | 0.07 | 0.04593 | 0.23 |
| NRG3 | 3340 | 1937959 | G | 0.07 | 0.01065 | 0.16 |
| NRG3 | 3341 | 7902584 | G | 0.07 | 0.01800 | 0.18 |
| HSPA12A | 3426 | 3010476 | G | 0.57 | 0.01576 | 2.93 |
| GRK5 | 3430 | 10787948 | C | 0.57 | 0.02343 | 2.73 |
| ATE1 | 3431 | 1693688 | C | 0.20 | 0.01128 | 0.28 |
| ATE1 | 3435 | 1219505 | T | 0.30 | 0.04890 | 0.40 |
| ARNTL | 3485 | 4372426 | C | 0.60 | 0.02093 | 2.80 |
| ARNTL | 3488 | 900144 | G | 0.61 | 0.04410 | 2.50 |
| SPON1 | 3514 | 4756787 | C | 0.03 | 0.03959 | 0.15 |
| OPCML | 3577 | 7110672 | C | 0.07 | 0.01288 | 0.17 |
| OPCML | 3579 | 6590700 | C | 0.10 | 0.03664 | 0.27 |
| OPCML | 3583 | 12419575 | A | 0.07 | 0.02497 | 0.20 |
| OPCML | 3585 | 7936263 | G | 0.17 | 0.03768 | 0.33 |
| OPCML | 3588 | 7108751 | T | 0.13 | 0.04096 | 0.31 |
| OPCML | 3589 | 4936195 | G | 0.03 | 0.02534 | 0.13 |
| TSPAN9 | 3592 | 4766079 | C | 0.07 | 0.01800 | 0.18 |
| STYK1 | 3615 | 10845198 | T | 0.47 | 0.04942 | 2.43 |
| ITPR2 | 3639 | 7955200 | C | 0.13 | 0.04935 | 0.32 |
| SLC46A3 | 3693 | 1617234 | C | 0.30 | 0.04890 | 0.40 |
| SLC46A3 | 3694 | 715704 | G | 0.53 | 0.04946 | 2.39 |
| NBEA | 3704 | 2322289 | C | 0.04 | 0.03687 | 0.14 |
| NBEA | 3714 | 4500591 | A | 0.10 | 0.00775 | 0.19 |
| NBEA | 3721 | 7327540 | A | 0.33 | 0.02840 | 0.37 |
| NBEA | 3722 | 3818423 | C | 0.13 | 0.01918 | 0.26 |
| NBEA | 3724 | 3794388 | C | 0.07 | 0.03436 | 0.21 |
| GPC5 | 3762 | 9523312 | G | 0.17 | 0.00620 | 0.24 |
| GPC5 | 3763 | 9523313 | G | 0.17 | 0.01797 | 0.29 |
| GPC5 | 3779 | 1972350 | T | 0.47 | 0.02199 | 2.84 |
| GPC6 | 3812 | 9301916 | C | 0.47 | 0.03353 | 2.63 |
| GPC6 | 3813 | 9524268 | T | 0.47 | 0.03353 | 2.63 |
| GPC6 | 3819 | 4468463 | G | 0.03 | 0.03959 | 0.15 |
| ITGBL1 | 3839 | 1335589 | T | 0.20 | 0.04238 | 0.36 |
| NOVA1 | 3863 | 1950420 | G | 0.43 | 0.03166 | 2.70 |
| SLC25A21 | 3881 | 712377 | C | 0.27 | 0.02292 | 0.34 |
| SLC25A21 | 3885 | 1367029 | T | 0.37 | 0.02034 | 0.35 |
| GNG2 | 3908 | 10138800 | A | 0.27 | 0.02258 | 0.34 |
| SAMD4A | 3918 | 17128004 | A | 0.37 | 0.03069 | 2.90 |
| SAMD4A | 3919 | 10483639 | C | 0.37 | 0.04060 | 2.70 |
| RGS6 | 3953 | 917426 | G | 0.57 | 0.03396 | 2.56 |
| KCNK10 | 3961 | 1956541 | T | 0.30 | 0.04823 | 2.81 |
| KCNK10 | 3965 | 17698533 | C | 0.47 | 0.04942 | 2.43 |
| KCNK13 | 3968 | 12892344 | A | 0.30 | 0.03581 | 0.38 |
| ATXN3 | 3989 | 10140469 | G | 0.40 | 0.01304 | 3.33 |
| ATXN3 | 3990 | 12588287 | C | 0.40 | 0.01771 | 3.11 |
| ATXN3 | 3991 | 10146087 | G | 0.40 | 0.01771 | 3.11 |
| ATXN3 | 3992 | 11850101 | A | 0.40 | 0.01771 | 3.11 |
| ATXN3 | 3993 | 10146249 | A | 0.40 | 0.01771 | 3.11 |
| ATXN3 | 3994 | 1048755 | A | 0.40 | 0.01771 | 3.11 |
| ATXN3 | 3995 | 8020781 | C | 0.40 | 0.01771 | 3.11 |
| ATXN3 | 3996 | 1072958 | G | 0.40 | 0.01771 | 3.11 |
| ATXN3 | 3997 | 1072957 | C | 0.40 | 0.01771 | 3.11 |
| ATP10A | 4017 | 4906654 | T | 0.23 | 0.04150 | 3.47 |
| RYR3 | 4024 | 8043532 | C | 0.53 | 0.03460 | 2.56 |
| RYR3 | 4031 | 2132208 | A | 0.20 | 0.00448 | 8.25 |
| CGNL1 | 4069 | 4774940 | C | 0.10 | 0.01931 | 0.23 |
| CGNL1 | 4070 | 7182648 | T | 0.07 | 0.04693 | 0.23 |
| TBC1D2B | 4096 | 3803380 | G | 0.30 | 0.02800 | 3.21 |
| ARNT2 | 4105 | 7180510 | G | 0.50 | 0.02977 | 2.67 |
| A2BP1 | 4117 | 8059039 | T | 0.27 | 0.02372 | 3.64 |
| A2BP1 | 4118 | 1155959 | C | 0.40 | 0.04485 | 2.57 |
| A2BP1 | 4133 | 7498500 | C | 0.17 | 0.00895 | 0.25 |
| A2BP1 | 4138 | 7191615 | A | 0.13 | 0.04796 | 5.08 |
| EEF2K | 4148 | 4275840 | T | 0.37 | 0.00515 | 4.20 |
| PLCG2 | 4161 | 8043845 | C | 0.10 | 0.01382 | 0.22 |
| MPHOSPH6 | 4163 | 8052512 | T | 0.07 | 0.04085 | 0.22 |
| CDH13 | 4193 | 1424189 | T | 0.13 | 0.00967 | 0.23 |
| CDH13 | 4195 | 723920 | A | 0.20 | 0.03105 | 0.34 |
| CDH13 | 4197 | 11864731 | A | 0.20 | 0.00783 | 0.27 |
| CDH13 | 4198 | 10514577 | G | 0.23 | 0.02700 | 0.34 |
| RAB11FIP4 | 4224 | 757378 | T | 0.53 | 0.04006 | 2.51 |
| CA10 | 4227 | 8076197 | A | 0.30 | 0.02563 | 0.36 |
| CA10 | 4228 | 8076496 | A | 0.30 | 0.02563 | 0.36 |
| CA10 | 4231 | 203010 | T | 0.73 | 0.00507 | 3.70 |
| CA10 | 4233 | 203042 | A | 0.27 | 0.01595 | 0.32 |
| CA10 | 4234 | 4794315 | G | 0.67 | 0.01999 | 2.86 |
| CA10 | 4236 | 9896168 | G | 0.63 | 0.02793 | 2.70 |
| CA10 | 4240 | 1503058 | A | 0.70 | 0.02535 | 2.82 |
| CA10 | 4241 | 11652641 | G | 0.37 | 0.02505 | 3.00 |
| CA10 | 4242 | 12150128 | C | 0.29 | 0.04460 | 3.00 |
| DNAH17 | 4266 | 11649879 | T | 0.13 | 0.04796 | 5.08 |
| OSBPL1A | 4309 | 6508259 | A | 0.07 | 0.01250 | 0.17 |
| NEDD4L | 4335 | 11152073 | A | 0.07 | 0.00309 | 0.13 |
| CDH7 | 4351 | 976882 | A | 0.33 | 0.01781 | 0.34 |
| CDH7 | 4352 | 12970791 | T | 0.33 | 0.01999 | 0.35 |
| CDH7 | 4353 | 10871590 | A | 0.53 | 0.04946 | 2.39 |
| CDH7 | 4359 | 7244664 | G | 0.10 | 0.00808 | 0.23 |
| CDH7 | 4362 | 9950064 | A | 0.10 | 0.00808 | 2.70 |
| CDH7 | 4364 | 9945997 | A | 0.10 | 0.00808 | 2.49 |
| CDH7 | 4366 | 1976073 | C | 0.07 | 0.03146 | 0.29 |
| CDH7 | 4367 | 2587438 | C | 0.07 | 0.03146 | 3.36 |
| CDH7 | 4368 | 205084 | C | 0.07 | 0.03146 | 0.29 |
| PLCB1 | 4413 | 8123568 | A | 0.37 | 0.04060 | 2.70 |
| PLCB1 | 4415 | 2235212 | A | 0.37 | 0.02505 | 3.00 |
| PLCB1 | 4425 | 718711 | A | 0.07 | 0.00063 | 0.10 |
| PLCB1 | 4426 | 6133621 | C | 0.07 | 0.00096 | 0.11 |
| KIF16B | 4464 | 2144883 | T | 0.27 | 0.01108 | 0.30 |
| KIF16B | 4465 | 2328019 | C | 0.27 | 0.01108 | 0.30 |
| KIF16B | 4466 | 2144886 | T | 0.33 | 0.02615 | 0.36 |
| KIF16B | 4467 | 2180443 | A | 0.33 | 0.02840 | 0.37 |
| KIF16B | 4468 | 2144891 | A | 0.33 | 0.02840 | 0.37 |
| KIF16B | 4469 | 6111075 | T | 0.33 | 0.02840 | 0.37 |
| KIF16B | 4470 | 6111076 | C | 0.33 | 0.02840 | 0.37 |
| KIF16B | 4471 | 1884598 | G | 0.33 | 0.02840 | 0.37 |
| KIF16B | 4472 | 6034464 | A | 0.33 | 0.02840 | 0.37 |
| KIF16B | 4475 | 7263619 | T | 0.39 | 0.04638 | 2.64 |
| PTPRT | 4501 | 6016688 | T | 0.33 | 0.04203 | 2.80 |
| PTPRT | 4502 | 6124439 | A | 0.40 | 0.03564 | 2.72 |
| ARVCF | 4567 | 1110477 | C | 0.07 | 0.03146 | 0.22 |
| ARVCF | 4568 | 887200 | C | 0.10 | 0.00808 | 2.39 |
| ARVCF | 4570 | 887203 | A | 0.07 | 0.03146 | 2.63 |

TABLE 16
Alleles Influencing Discontinuation from Adverse Events for Olanzapine

| Gene | Seq ID | NCBI RS # | Allele | Freq. in Discontinuers | P | Odds Ratio |
|---|---|---|---|---|---|---|
| RP1-21O18.1 | 10 | 6693853 | T | 0.58 | 0.037160 | 1.99 |
| RP1-21O18.1 | 11 | 6665012 | G | 0.58 | 0.037160 | 1.99 |
| AGBL4-C1orf165 | 38 | 3121518 | A | 0.27 | 0.037710 | 0.47 |
| SEC16B | 126 | 1889981 | T | 0.37 | 0.042350 | 2.06 |
| SEC16B | 127 | 1415085 | A | 0.12 | 0.045540 | 0.39 |
| USH2A | 154 | 7548730 | C | 0.40 | 0.030090 | 2.12 |
| GNG4 | 192 | 10925976 | A | 0.58 | 0.022620 | 2.13 |
| RYR2 | 204 | 4376724 | C | 0.29 | 0.041420 | 0.49 |
| RYR2 | 205 | 3924864 | C | 0.27 | 0.001269 | 3.92 |
| CHRM3 | 226 | 479933 | A | 0.32 | 0.030190 | 2.27 |
| CHRM3 | 227 | 663927 | A | 0.33 | 0.031270 | 2.22 |
| FMN2 | 248 | 11799544 | T | 0.21 | 0.000617 | 5.46 |
| FMN2 | 249 | 10926257 | T | 0.21 | 0.000617 | 5.46 |
| BRE | 321 | 6732163 | G | 0.31 | 0.042990 | 2.14 |
| CRIM1 | 328 | 3770939 | T | 0.42 | 0.029140 | 2.11 |
| PRKCE | 377 | 556650 | T | 0.27 | 0.018600 | 2.58 |
| PRKCE | 387 | 6748375 | C | 0.38 | 0.038590 | 0.50 |
| EPAS1 | 391 | 17034950 | A | 0.44 | 0.011130 | 2.38 |
| ACYP2 | 412 | 918357 | G | 0.63 | 0.015920 | 2.25 |
| ACYP2 | 413 | 10186140 | C | 0.04 | 0.037230 | 0.23 |
| CCDC85A | 421 | 2869529 | C | 0.48 | 0.042890 | 1.97 |
| CCDC85A | 423 | 214047 | C | 0.04 | 0.028760 | 0.22 |
| CCDC85A | 424 | 214041 | T | 0.58 | 0.003955 | 2.60 |
| CCDC85A | 426 | 1990758 | C | 0.25 | 0.016630 | 2.71 |
| CTNNA2 | 449 | 2974169 | C | 0.33 | 0.016640 | 0.44 |
| CTNNA2 | 450 | 2916519 | T | 0.33 | 0.021340 | 0.46 |
| NAP5 | 487 | 11695364 | T | 0.38 | 0.011400 | 2.45 |
| LRP1B | 517 | 11681928 | A | 0.42 | 0.029140 | 2.11 |
| LRP1B | 522 | 11691595 | G | 0.44 | 0.036940 | 2.03 |
| ARHGAP15 | 537 | 354714 | T | 0.31 | 0.030730 | 0.47 |
| ARHGAP15 | 548 | 2381466 | A | 0.26 | 0.022920 | 0.44 |
| ARHGAP15 | 559 | 16823114 | A | 0.19 | 0.006185 | 0.35 |
| ARHGAP15 | 560 | 10928200 | T | 0.19 | 0.008093 | 0.36 |
| ARHGAP15 | 561 | 13031917 | C | 0.19 | 0.008668 | 0.36 |
| CACNB4 | 566 | 6736449 | C | 0.60 | 0.012000 | 2.30 |
| CACNB4 | 568 | 7582231 | C | 0.60 | 0.026450 | 2.09 |
| KCNJ3 | 591 | 2937609 | C | 0.23 | 0.024360 | 0.42 |
| CERKL | 632 | 895901 | A | 0.48 | 0.009179 | 2.41 |
| NRP2 | 668 | 849540 | T | 0.60 | 0.020530 | 2.16 |
| NRP2 | 669 | 849538 | T | 0.58 | 0.022620 | 2.13 |
| NRP2 | 670 | 849526 | A | 0.37 | 0.043550 | 0.51 |
| NRP2 | 671 | 849525 | A | 0.36 | 0.049730 | 0.51 |
| ERBB4 | 678 | 12998535 | T | 0.40 | 0.016090 | 2.31 |
| ERBB4 | 679 | 3828242 | G | 0.40 | 0.019260 | 2.27 |
| ERBB4 | 680 | 1992029 | G | 0.42 | 0.029140 | 2.11 |
| DNER | 714 | 10170426 | T | 0.00 | 0.032350 | 0.00 |
| CNTN6 | 739 | 3732517 | C | 0.19 | 0.044470 | 0.45 |
| CNTN4 | 758 | 17029515 | G | 0.31 | 0.003594 | 0.37 |
| CNTN4 | 759 | 11915265 | T | 0.29 | 0.004547 | 0.36 |
| CNTN4 | 760 | 1153486 | T | 0.33 | 0.021340 | 0.46 |
| CNTN4 | 761 | 1685456 | C | 0.36 | 0.025010 | 0.47 |
| ITPR1 | 774 | 304073 | G | 0.52 | 0.043680 | 2.00 |
| IRAK2 | 786 | 11717636 | C | 0.42 | 0.036420 | 0.50 |
| ATP2B2 | 787 | 241508 | A | 0.56 | 0.049230 | 1.95 |
| ATP2B2 | 791 | 11719939 | G | 0.40 | 0.005456 | 2.66 |
| ATP2B2 | 792 | 6763274 | C | 0.40 | 0.006565 | 2.61 |
| ULK4 | 833 | 10510719 | A | 0.15 | 0.032150 | 0.41 |
| FLNB | 907 | 9834312 | A | 0.18 | 0.039760 | 0.43 |
| FHIT | 920 | 9311767 | G | 0.56 | 0.001187 | 2.97 |
| FHIT | 930 | 12638466 | G | 0.42 | 0.029140 | 2.11 |
| PRICKLE2 | 967 | 696027 | T | 0.37 | 0.016110 | 2.37 |
| PLCXD2 | 1010 | 1513331 | C | 0.21 | 0.049150 | 2.37 |
| STXBP5L | 1029 | 2331538 | T | 0.35 | 0.024240 | 0.47 |
| STXBP5L | 1031 | 17249426 | A | 0.33 | 0.031120 | 2.27 |
| STXBP5L | 1032 | 1108170 | T | 0.35 | 0.032280 | 0.47 |
| STXBP5L | 1036 | 2169302 | G | 0.21 | 0.049150 | 2.37 |
| KALRN | 1039 | 9880957 | G | 0.35 | 0.014620 | 0.44 |
| KALRN | 1042 | 661798 | C | 0.62 | 0.018480 | 2.19 |
| CPNE4 | 1049 | 6792146 | A | 0.21 | 0.022010 | 2.81 |
| CPNE4 | 1051 | 6808429 | C | 0.23 | 0.004598 | 3.54 |
| CPNE4 | 1052 | 6802747 | G | 0.13 | 0.039290 | 3.16 |
| CPNE4 | 1058 | 6806898 | T | 0.27 | 0.013610 | 2.73 |
| RAB6B | 1061 | 6765093 | G | 0.50 | 0.040170 | 1.98 |
| SERPINI2 | 1088 | 9841174 | C | 0.54 | 0.044170 | 1.94 |
| SERPINI2 | 1089 | 17246389 | C | 0.44 | 0.003797 | 2.71 |
| TNIK | 1099 | 4955765 | G | 0.65 | 0.008359 | 2.44 |
| PLD1 | 1105 | 4894760 | T | 0.40 | 0.016090 | 2.31 |
| NLGN1 | 1118 | 9878812 | C | 0.04 | 0.031720 | 0.22 |
| HTR3C | 1131 | 6443938 | A | 0.50 | 0.001657 | 2.94 |
| IL1RAP | 1144 | 6788050 | G | 0.10 | 0.026700 | 4.63 |
| SLC2A9 | 1157 | 1568318 | C | 0.13 | 0.028860 | 0.38 |
| SLC2A9 | 1158 | 938563 | G | 0.14 | 0.030440 | 0.39 |
| SLC2A9 | 1160 | 4529048 | C | 0.12 | 0.004553 | 0.28 |
| SLC2A9 | 1163 | 7669607 | T | 0.12 | 0.013260 | 0.32 |
| SLC2A9 | 1164 | 10023068 | A | 0.06 | 0.003129 | 0.18 |
| SLC2A9 | 1165 | 9291640 | C | 0.06 | 0.003129 | 0.18 |
| SLC2A9 | 1166 | 9291642 | C | 0.06 | 0.027060 | 0.27 |
| SLC2A9 | 1167 | 12509955 | T | 0.13 | 0.028860 | 0.38 |
| PPARGC1A | 1193 | 8192678 | A | 0.44 | 0.036940 | 2.03 |
| CCKAR | 1197 | 2040342 | C | 0.33 | 0.000003 | 7.29 |
| CCKAR | 1198 | 2130250 | A | 0.44 | 0.005535 | 2.59 |
| KIAA1239 | 1210 | 11727634 | C | 0.28 | 0.017050 | 2.63 |
| LIMCH1 | 1226 | 4861131 | T | 0.20 | 0.049210 | 0.46 |
| NPFFR2 | 1235 | 11936367 | G | 0.48 | 0.001589 | 2.98 |
| CXCL9 | 1253 | 2869460 | A | 0.08 | 0.027240 | 0.30 |
| FAM13A1 | 1288 | 1996139 | A | 0.13 | 0.019840 | 3.83 |
| FAM13A1 | 1289 | 1513811 | T | 0.13 | 0.039290 | 3.16 |
| COL25A1 | 1319 | 13104307 | T | 0.23 | 0.004186 | 0.35 |
| COL25A1 | 1335 | 7675657 | A | 0.19 | 0.035530 | 0.44 |
| ANK2 | 1339 | 313941 | G | 0.04 | 0.025670 | 2.98 |
| ANK2 | 1346 | 11942005 | G | 0.27 | 0.018600 | 2.58 |
| ANK2 | 1351 | 29306 | G | 0.13 | 0.013790 | 0.34 |
| ANK2 | 1353 | 29311 | A | 0.12 | 0.008824 | 0.30 |
| NDST3 | 1372 | 2389498 | T | 0.06 | 0.027060 | 0.27 |
| NDST3 | 1373 | 4558930 | C | 0.06 | 0.044670 | 0.30 |
| MAML3 | 1399 | 7698089 | T | 0.25 | 0.003842 | 0.35 |
| MAML3 | 1400 | 7656823 | A | 0.25 | 0.003842 | 0.35 |
| MAML3 | 1401 | 4863720 | C | 0.25 | 0.007220 | 0.38 |
| IL15 | 1405 | 10519613 | A | 0.21 | 0.049150 | 2.37 |
| FSTL5 | 1452 | 4501178 | C | 0.35 | 0.015790 | 2.42 |
| FSTL5 | 1462 | 17459658 | C | 0.04 | 0.014570 | 0.19 |
| FSTL5 | 1466 | 13110363 | G | 0.21 | 0.011500 | 3.17 |
| FSTL5 | 1469 | 7375994 | A | 0.31 | 0.005990 | 2.90 |
| FSTL5 | 1470 | 13113862 | A | 0.27 | 0.022870 | 2.55 |
| FSTL5 | 1473 | 4691039 | T | 0.31 | 0.041440 | 2.19 |
| AHRR | 1530 | 3734145 | T | 0.42 | 0.025630 | 2.15 |
| DNAH5 | 1548 | 6862469 | C | 0.60 | 0.011470 | 2.32 |
| DNAH5 | 1549 | 6876673 | T | 0.58 | 0.017380 | 2.20 |
| MYO10 | 1569 | 388887 | T | 0.30 | 0.026150 | 0.46 |
| CDH10 | 1575 | 3822429 | T | 0.29 | 0.012420 | 0.42 |
| SLC1A3 | 1585 | 6878201 | T | 0.31 | 0.042990 | 2.14 |
| ITGA1 | 1599 | 13189973 | T | 0.08 | 0.002099 | 0.21 |
| ITGA1 | 1600 | 4865747 | T | 0.04 | 0.004332 | 0.15 |
| ITGA1 | 1602 | 17209947 | A | 0.04 | 0.005148 | 0.15 |
| PDE4D | 1622 | 10461657 | G | 0.04 | 0.026570 | 0.21 |
| PDE4D | 1631 | 294492 | T | 0.17 | 0.005492 | 4.26 |
| PDE4D | 1632 | 294494 | A | 0.33 | 0.013880 | 2.53 |
| PDE4D | 1634 | 295955 | G | 0.17 | 0.021490 | 3.14 |
| PDE4D | 1635 | 295963 | C | 0.17 | 0.023690 | 3.09 |
| GPR98 | 1682 | 168743 | G | 0.17 | 0.045620 | 0.44 |
| FBXL17 | 1705 | 12515105 | C | 0.32 | 0.023730 | 0.46 |
| FBXL17 | 1716 | 6875297 | C | 0.67 | 0.038610 | 2.06 |
| FBXL17 | 1717 | 4957554 | C | 0.16 | 0.000345 | 0.23 |
| FBXL17 | 1718 | 2024528 | A | 0.65 | 0.012500 | 2.41 |
| FBXL17 | 1719 | 2193976 | T | 0.63 | 0.021020 | 2.17 |
| SEMA6A | 1734 | 34971 | G | 0.44 | 0.039310 | 2.02 |
| SNCAIP | 1750 | 17149128 | G | 0.23 | 0.044370 | 2.36 |
| ODZ2 | 1794 | 10055910 | T | 0.35 | 0.015790 | 2.42 |
| GABRP | 1803 | 11134650 | C | 0.19 | 0.008509 | 3.57 |
| ATXN1 | 1835 | 235147 | A | 0.32 | 0.030020 | 0.47 |
| RNF144B | 1839 | 1408267 | G | 0.10 | 0.033690 | 0.35 |
| BTN3A3 | 1874 | 2237236 | G | 0.23 | 0.009517 | 0.39 |
| BTNL2 | 1876 | 3806156 | T | 0.23 | 0.012340 | 0.40 |
| KLC4 | 1883 | 3793017 | C | 0.37 | 0.022690 | 2.26 |
| SLC22A16 | 1931 | 17071722 | T | 0.22 | 0.026790 | 2.68 |
| SLC22A16 | 1932 | 7768422 | C | 0.21 | 0.031910 | 2.59 |
| TRDN | 1949 | 2317707 | T | 0.27 | 0.028460 | 0.46 |
| NKAIN2 | 1954 | 342623 | T | 0.25 | 0.021300 | 2.62 |
| NKAIN2 | 1965 | 9388339 | A | 0.33 | 0.035850 | 2.18 |
| PLAGL1 | 1990 | 9321951 | T | 0.27 | 0.037250 | 0.48 |
| SYNE1 | 2005 | 2763015 | A | 0.62 | 0.038590 | 1.99 |
| CARD11 | 2068 | 3735131 | C | 0.10 | 0.032970 | 4.41 |
| CREB5 | 2120 | 7791555 | G | 0.16 | 0.043170 | 0.42 |
| ABCA13 | 2194 | 17132289 | T | 0.02 | 0.044780 | 0.16 |
| ABCA13 | 2195 | 7802110 | G | 0.16 | 0.021480 | 0.38 |
| ABCA13 | 2197 | 6966506 | A | 0.13 | 0.022690 | 0.37 |
| ABCA13 | 2199 | 7778020 | A | 0.04 | 0.037230 | 0.23 |
| LIMK1 | 2249 | 810532 | G | 0.10 | 0.049050 | 0.37 |
| MAGI2 | 2271 | 10238177 | A | 0.25 | 0.024210 | 0.44 |
| MAGI2 | 2295 | 848942 | C | 0.52 | 0.044370 | 1.97 |
| PCLO | 2321 | 2715148 | C | 0.40 | 0.032390 | 0.49 |
| PCLO | 2325 | 2888019 | T | 0.60 | 0.030960 | 2.09 |
| PCLO | 2326 | 1986742 | G | 0.60 | 0.033770 | 2.02 |
| CUX1 | 2400 | 940482 | T | 0.06 | 0.012400 | 0.23 |
| KCND2 | 2412 | 802372 | C | 0.04 | 0.048060 | 0.24 |
| GRM8 | 2439 | 2283061 | G | 0.56 | 0.014440 | 2.25 |
| EXOC4 | 2453 | 7786489 | A | 0.12 | 0.044870 | 0.39 |
| PTPRN2 | 2516 | 221242 | A | 0.16 | 0.040950 | 2.86 |
| PTPRN2 | 2523 | 10277112 | A | 0.17 | 0.007146 | 0.32 |
| PTPRN2 | 2534 | 10266729 | C | 0.62 | 0.047940 | 1.94 |
| MCPH1 | 2560 | 2442497 | G | 0.21 | 0.019710 | 2.85 |
| SGCZ | 2579 | 9325685 | C | 0.30 | 0.007190 | 0.39 |
| PSD3 | 2613 | 3758141 | C | 0.27 | 0.007317 | 3.00 |
| LYN | 2674 | 2719268 | G | 0.35 | 0.021410 | 2.33 |
| NKAIN3 | 2705 | 975688 | T | 0.23 | 0.040790 | 0.47 |
| DEPDC2 | 2728 | 1434764 | A | 0.25 | 0.019020 | 0.43 |
| CSMD3 | 2815 | 4354335 | G | 0.40 | 0.021160 | 2.29 |
| CSMD3 | 2816 | 1513524 | C | 0.35 | 0.042990 | 2.08 |
| CSMD3 | 2817 | 2954892 | G | 0.35 | 0.042990 | 2.08 |
| FBXO32 | 2830 | 6990407 | G | 0.04 | 0.048060 | 0.24 |
| MTSS1 | 2853 | 9771920 | A | 0.21 | 0.012920 | 3.11 |
| MTSS1 | 2854 | 4870913 | T | 0.21 | 0.035420 | 2.55 |
| DDEF1 | 2861 | 6984815 | A | 0.21 | 0.027150 | 0.43 |
| DDEF1 | 2862 | 12546206 | A | 0.46 | 0.045530 | 1.96 |
| DDEF1 | 2877 | 1123205 | G | 0.50 | 0.013310 | 2.41 |
| ADCY8 | 2891 | 7464362 | G | 0.48 | 0.020830 | 2.18 |
| ADCY8 | 2892 | 11781997 | A | 0.65 | 0.003414 | 2.69 |
| ADCY8 | 2893 | 7459573 | G | 0.54 | 0.034640 | 2.01 |
| ADCY8 | 2894 | 4736722 | C | 0.33 | 0.034380 | 0.49 |
| PTPRD | 2953 | 4742533 | C | 0.38 | 0.020570 | 2.29 |
| PTPRD | 2954 | 10815933 | C | 0.37 | 0.031300 | 2.15 |
| KIAA1797 | 2959 | 12336110 | A | 0.35 | 0.018390 | 2.37 |
| KIAA1797 | 2960 | 7848159 | G | 0.04 | 0.028760 | 0.22 |
| PIP5K1B | 2995 | 963707 | G | 0.44 | 0.036940 | 2.03 |
| PIP5K1B | 2998 | 1541082 | A | 0.02 | 0.018550 | 0.12 |
| TMC1 | 3032 | 13285999 | A | 0.62 | 0.014200 | 2.26 |
| NTRK2 | 3071 | 11140721 | C | 0.15 | 0.029140 | 3.14 |
| ZNF618 | 3134 | 2269454 | G | 0.40 | 0.005456 | 2.66 |
| LHX6 | 3149 | 7849627 | G | 0.50 | 0.040170 | 1.98 |
| ABL1 | 3165 | 2855160 | T | 0.27 | 0.046630 | 0.49 |
| EXOSC2 | 3166 | 4740366 | G | 0.10 | 0.033690 | 0.35 |
| ABL1 | 3172 | 10901297 | A | 0.13 | 0.045020 | 3.34 |
| MYO3A | 3267 | 993397 | A | 0.56 | 0.005913 | 2.49 |
| MYO3A | 3277 | 2096176 | T | 0.29 | 0.026170 | 0.46 |
| MYO3A | 3280 | 1999240 | C | 0.56 | 0.031870 | 2.03 |
| MYO3A | 3281 | 3758447 | C | 0.29 | 0.045580 | 0.49 |
| MYO3A | 3289 | 2050440 | A | 0.35 | 0.030820 | 0.48 |
| SLC16A9 | 3291 | 1171648 | A | 0.12 | 0.017090 | 0.33 |
| SLC16A9 | 3292 | 1171643 | G | 0.12 | 0.021930 | 0.35 |
| JMJD1C | 3298 | 10740118 | C | 0.50 | 0.013410 | 2.28 |
| JMJD1C | 3301 | 9629895 | A | 0.10 | 0.020610 | 0.32 |
| JMJD1C | 3302 | 3999089 | C | 0.54 | 0.032810 | 2.03 |
| CDH23 | 3314 | 4747197 | T | 0.46 | 0.004661 | 2.63 |
| CDH23 | 3315 | 2070968 | A | 0.31 | 0.019160 | 2.46 |
| NRG3 | 3339 | 17099789 | G | 0.06 | 0.019680 | 0.25 |
| NRG3 | 3341 | 7902584 | G | 0.02 | 0.015140 | 0.12 |
| NRG3 | 3345 | 474496 | G | 0.46 | 0.013080 | 2.32 |
| NRG3 | 3347 | 495978 | A | 0.42 | 0.045280 | 1.98 |
| ATRNL1 | 3420 | 10885833 | C | 0.17 | 0.040800 | 2.72 |
| ATRNL1 | 3421 | 180675 | A | 0.28 | 0.029530 | 2.38 |
| ATRNL1 | 3422 | 180635 | T | 0.35 | 0.042990 | 2.08 |
| ATE1 | 3431 | 1693688 | C | 0.54 | 0.011740 | 2.31 |
| ATE1 | 3433 | 7086628 | C | 0.62 | 0.013770 | 2.28 |
| ATE1 | 3434 | 2132902 | T | 0.54 | 0.015650 | 2.23 |
| ATE1 | 3435 | 1219505 | T | 0.58 | 0.017380 | 2.20 |
| MICAL2 | 3472 | 2015963 | T | 0.58 | 0.037160 | 1.99 |
| 81.99 mb | 3523 | 2186693 | T | 0.17 | 0.015130 | 0.38 |
| DLG2 | 3533 | 10898148 | A | 0.32 | 0.016760 | 2.49 |
| DLG2 | 3534 | 7950988 | T | 0.31 | 0.039880 | 2.18 |
| DLG2 | 3549 | 11234225 | T | 0.58 | 0.011850 | 2.31 |
| DLG2 | 3550 | 6592211 | A | 0.60 | 0.008591 | 2.40 |
| DLG2 | 3551 | 7101454 | C | 0.56 | 0.030440 | 2.05 |
| OPCML | 3573 | 11223425 | A | 0.27 | 0.028460 | 0.46 |
| OPCML | 3574 | 4937764 | T | 0.67 | 0.034380 | 2.06 |
| OPCML | 3575 | 7107264 | C | 0.21 | 0.019710 | 2.85 |
| OPCML | 3576 | 1941219 | G | 0.23 | 0.023090 | 2.65 |
| TMEM16B | 3598 | 16933813 | A | 0.18 | 0.016520 | 3.29 |
| TMEM16B | 3602 | 12578500 | A | 0.17 | 0.021490 | 3.14 |
| STYK1 | 3609 | 1078437 | G | 0.56 | 0.031990 | 2.05 |
| STYK1 | 3613 | 6488316 | T | 0.62 | 0.007691 | 2.46 |
| STYK1 | 3614 | 7350597 | A | 0.60 | 0.008762 | 2.42 |
| STYK1 | 3615 | 10845198 | T | 0.54 | 0.025310 | 2.10 |
| STYK1 | 3616 | 10743918 | C | 0.22 | 0.010240 | 0.38 |
| CNOT2 | 3641 | 2118427 | T | 0.19 | 0.043910 | 2.53 |
| CNOT2 | 3648 | 10506586 | A | 0.15 | 0.007767 | 4.40 |
| CNOT2 | 3649 | 2870879 | G | 0.15 | 0.016660 | 3.64 |
| CNOT2 | 3650 | 3817486 | G | 0.15 | 0.029140 | 3.14 |
| NAV3 | 3676 | 392085 | G | 0.08 | 0.030900 | 0.31 |
| SLC46A3 | 3695 | 952648 | G | 0.31 | 0.047380 | 0.50 |
| NBEA | 3722 | 3818423 | C | 0.06 | 0.034830 | 0.28 |
| FNDC3A | 3733 | 9535073 | C | 0.30 | 0.030100 | 2.31 |
| FNDC3A | 3734 | 7321178 | G | 0.37 | 0.048800 | 2.02 |
| PCDH20 | 3738 | 3812872 | C | 0.38 | 0.016200 | 2.34 |
| GPC5 | 3771 | 553717 | A | 0.21 | 0.006283 | 3.55 |
| GPC5 | 3772 | 342678 | A | 0.21 | 0.007109 | 3.49 |
| NALCN | 3834 | 499685 | T | 0.56 | 0.031870 | 2.03 |
| ITGBL1 | 3847 | 1436261 | C | 0.10 | 0.042770 | 0.36 |
| ITGBL1 | 3851 | 1469855 | G | 0.27 | 0.045860 | 2.21 |
| ITGBL1 | 3852 | 1469853 | G | 0.27 | 0.045860 | 2.21 |
| NPAS3 | 3870 | 1315139 | T | 0.56 | 0.017950 | 2.19 |
| LRFN5 | 3895 | 1597045 | T | 0.40 | 0.009054 | 2.57 |
| LRFN5 | 3896 | 8015480 | C | 0.42 | 0.006701 | 2.57 |
| GNG2 | 3907 | 4898721 | C | 0.29 | 0.015270 | 2.60 |
| RGS6 | 3941 | 2238199 | T | 0.56 | 0.047580 | 1.95 |
| RGS6 | 3943 | 2214965 | T | 0.52 | 0.029010 | 2.06 |
| RGS6 | 3951 | 2239219 | C | 0.60 | 0.041800 | 1.97 |
| RGS6 | 3952 | 2238192 | A | 0.54 | 0.020630 | 2.15 |
| PSMC1 | 3971 | 6575121 | C | 0.13 | 0.039290 | 3.16 |
| RPS6KA5 | 3973 | 941847 | T | 0.14 | 0.005797 | 0.30 |
| RPS6KA5 | 3978 | 1075014 | C | 0.23 | 0.020310 | 0.42 |
| RPS6KA5 | 3979 | 11159988 | C | 0.23 | 0.020310 | 0.42 |
| BCL11B | 3998 | 807450 | C | 0.19 | 0.044470 | 0.45 |
| RYR3 | 4028 | 16957065 | G | 0.52 | 0.025210 | 2.11 |
| PCSK6 | 4109 | 755867 | A | 0.10 | 0.026420 | 0.33 |
| A2BP1 | 4117 | 8059039 | T | 0.30 | 0.016110 | 2.60 |
| A2BP1 | 4134 | 7191740 | C | 0.08 | 0.014440 | 0.27 |
| A2BP1 | 4137 | 8054765 | G | 0.15 | 0.025300 | 0.39 |
| MPHOSPH6 | 4173 | 2967391 | G | 0.06 | 0.005492 | 0.20 |
| MPHOSPH6 | 4174 | 2967340 | C | 0.06 | 0.007233 | 0.21 |
| MPHOSPH6 | 4176 | 902542 | A | 0.06 | 0.008486 | 0.21 |
| MPHOSPH6 | 4177 | 2967337 | C | 0.06 | 0.020940 | 0.25 |
| MPHOSPH6 | 4179 | 2967333 | G | 0.08 | 0.021700 | 0.29 |
| MPHOSPH6 | 4180 | 2967328 | C | 0.08 | 0.024080 | 0.30 |
| CDH13 | 4186 | 4598906 | T | 0.23 | 0.040790 | 0.47 |
| CDH13 | 4193 | 1424189 | T | 0.58 | 0.005441 | 2.52 |
| CDH13 | 4195 | 723920 | A | 0.58 | 0.028050 | 2.07 |
| CDH13 | 4196 | 10514579 | C | 0.43 | 0.043520 | 2.04 |
| CDH13 | 4198 | 10514577 | G | 0.58 | 0.035950 | 2.01 |
| DNAH17 | 4266 | 11649879 | T | 0.02 | 0.036340 | 0.15 |
| KIAA0802 | 4305 | 17407982 | C | 0.10 | 0.033790 | 0.35 |
| CHST9 | 4316 | 1426879 | C | 0.18 | 0.010190 | 0.36 |
| CHST9 | 4317 | 4800797 | G | 0.19 | 0.017440 | 0.40 |
| CDH7 | 4350 | 4455070 | T | 0.58 | 0.003955 | 2.60 |
| CDH7 | 4351 | 976882 | A | 0.58 | 0.003955 | 2.60 |
| CDH7 | 4352 | 12970791 | T | 0.58 | 0.003955 | 2.60 |
| PRNT | 4398 | 2065704 | A | 0.27 | 0.017580 | 0.43 |
| PRNT | 4402 | 6107527 | G | 0.60 | 0.003612 | 2.63 |
| PRNT | 4404 | 6052833 | C | 0.27 | 0.017580 | 0.43 |
| PRNT | 4407 | 6084876 | T | 0.28 | 0.034420 | 0.47 |
| PLCB1 | 4422 | 6039249 | G | 0.38 | 0.041780 | 2.05 |
| JAG1 | 4439 | 3748477 | T | 0.08 | 0.032450 | 5.48 |
| JAG1 | 4440 | 3748478 | T | 0.08 | 0.036660 | 5.30 |
| MACROD2 | 4448 | 459322 | G | 0.29 | 0.027170 | 0.45 |
| MACROD2 | 4449 | 459874 | C | 0.31 | 0.037940 | 0.49 |
| MACROD2 | 4453 | 175805 | T | 0.14 | 0.030440 | 0.39 |
| MACROD2 | 4454 | 2236008 | T | 0.15 | 0.022950 | 0.39 |
| KIF16B | 4482 | 7352372 | G | 0.35 | 0.015790 | 2.42 |
| KIF16B | 4483 | 6075069 | T | 0.29 | 0.029600 | 2.33 |
| PTPRT | 4497 | 6065432 | T | 0.15 | 0.046150 | 0.43 |
| PTPRT | 4500 | 6065434 | T | 0.19 | 0.047650 | 0.45 |
| PTPRT | 4501 | 6016688 | T | 0.12 | 0.027980 | 0.36 |
| SNAI1 | 4524 | 6020157 | A | 0.04 | 0.006507 | 0.16 |
| SNAI1 | 4525 | 4647957 | T | 0.04 | 0.044900 | 0.24 |
| SNAI1 | 4527 | 1543442 | A | 0.46 | 0.045210 | 1.97 |
| CDH4 | 4530 | 4812313 | G | 0.17 | 0.045620 | 0.44 |
| NCAM2 | 4551 | 986917 | A | 0.27 | 0.022450 | 0.44 |
| TTLL1 | 4593 | 5996268 | C | 0.10 | 0.031900 | 4.43 |

TABLE 17
Alleles Influencing Discontinuation from Adverse Events for Risperidone

| Gene Name | Seq ID | NCBI RS# | Allele | Freq. in Discontinuers | P | Odds Ratio |
|---|---|---|---|---|---|---|
| EPHB2 | 22 | 309500 | T | 0.77 | 0.00038 | 4.64 |
| EPHB2 | 23 | 309499 | T | 0.73 | 0.00064 | 4.19 |
| AGBL4-C1orf165 | 24 | 319965 | A | 0.63 | 0.01910 | 2.57 |
| SCP2 | 39 | 7528867 | A | 0.17 | 0.00230 | 6.20 |
| KCNK2 | 141 | 2123331 | G | 0.23 | 0.01638 | 0.34 |
| KCNK2 | 142 | 12038094 | T | 0.20 | 0.01409 | 0.32 |
| KCNK2 | 144 | 4655272 | A | 0.43 | 0.02761 | 0.42 |
| KCNK2 | 146 | 12039875 | A | 0.23 | 0.02608 | 0.37 |
| KCNK2 | 147 | 2363564 | C | 0.23 | 0.01638 | 0.34 |
| KCNK2 | 148 | 10779647 | T | 0.23 | 0.02241 | 0.36 |
| USH2A | 158 | 301760 | C | 0.20 | 0.04605 | 0.39 |
| ESRRG | 177 | 10218694 | A | 0.53 | 0.02252 | 2.47 |
| ESRRG | 178 | 12088947 | A | 0.53 | 0.02705 | 2.39 |
| RYR2 | 200 | 2275287 | A | 0.50 | 0.04452 | 2.22 |
| RGS7 | 261 | 12038803 | A | 0.07 | 0.00676 | 0.16 |
| PLD5 | 267 | 924775 | A | 0.07 | 0.03049 | 0.22 |
| C2orf46 | 278 | 10168400 | A | 0.20 | 0.02607 | 0.35 |
| DDEF2 | 281 | 2666218 | G | 0.46 | 0.04821 | 2.38 |
| KCNK3 | 306 | 1275982 | C | 0.17 | 0.02448 | 0.33 |
| PRKCE | 382 | 4953288 | T | 0.20 | 0.04436 | 0.39 |
| PRKCE | 385 | 2595222 | A | 0.50 | 0.04981 | 2.18 |
| PRKCE | 389 | 1020445 | C | 0.13 | 0.02699 | 0.30 |
| ACYP2 | 417 | 17045754 | C | 0.23 | 0.04732 | 2.63 |
| CTNNA2 | 444 | 1971766 | A | 0.46 | 0.03393 | 2.39 |
| NAP5 | 486 | 7559239 | T | 0.23 | 0.03500 | 0.39 |
| LRP1B | 506 | 825429 | C | 0.70 | 0.02783 | 2.51 |
| KYNU | 531 | 6429997 | C | 0.20 | 0.04605 | 0.39 |
| FMNL2 | 579 | 2346182 | G | 0.17 | 0.02911 | 0.34 |
| FMNL2 | 580 | 2577180 | G | 0.07 | 0.03477 | 0.23 |
| PKP4 | 595 | 4664966 | A | 0.23 | 0.04641 | 0.41 |
| PLA2R1 | 602 | 3828323 | C | 0.73 | 0.01120 | 2.96 |
| PLA2R1 | 605 | 3828324 | C | 0.27 | 0.01331 | 0.35 |
| PLA2R1 | 607 | 2715921 | G | 0.27 | 0.04121 | 2.58 |
| PLA2R1 | 608 | 2667011 | G | 0.37 | 0.00620 | 3.17 |
| PLA2R1 | 609 | 2667012 | C | 0.70 | 0.00320 | 3.38 |
| PLA2R1 | 610 | 2715936 | G | 0.50 | 0.00093 | 3.85 |
| PLA2R1 | 613 | 4665145 | T | 0.40 | 0.01053 | 2.86 |
| PLA2R1 | 614 | 16844715 | T | 0.17 | 0.01169 | 0.29 |
| SCN9A | 625 | 6746030 | A | 0.30 | 0.01662 | 2.92 |
| SCN9A | 626 | 2226711 | C | 0.30 | 0.01662 | 2.92 |
| COL4A3 | 706 | 4619602 | C | 0.27 | 0.03951 | 0.41 |
| COL4A3 | 707 | 2070735 | A | 0.20 | 0.01791 | 3.48 |
| COL4A3 | 708 | 7587228 | C | 0.17 | 0.03155 | 3.40 |
| COL4A3 | 710 | 11681636 | C | 0.27 | 0.04554 | 0.42 |
| CNTN6 | 733 | 11919853 | C | 0.47 | 0.04077 | 2.27 |
| CNTN6 | 736 | 11925058 | C | 0.63 | 0.00087 | 3.76 |
| CNTN4 | 772 | 1039255 | C | 0.67 | 0.03408 | 2.39 |
| ATP2B2 | 790 | 11710165 | C | 0.10 | 0.01529 | 0.24 |
| ATP2B2 | 793 | 34923 | G | 0.07 | 0.00416 | 0.15 |
| RARB | 804 | 1286654 | T | 0.50 | 0.04190 | 2.24 |
| RARB | 807 | 17526942 | T | 0.20 | 0.02770 | 3.17 |
| ZNF445 | 854 | 6766334 | C | 0.17 | 0.00844 | 0.28 |
| CACNA2D3 | 866 | 9825455 | A | 0.07 | 0.01258 | 0.18 |
| FHIT | 915 | 2630167 | G | 0.20 | 0.04080 | 2.90 |
| FHIT | 916 | 212016 | C | 0.33 | 0.04923 | 2.33 |
| CADPS | 944 | 9311842 | T | 0.37 | 0.04663 | 2.30 |
| CADPS | 945 | 1148827 | A | 0.17 | 0.03827 | 3.27 |
| CADPS | 948 | 17357618 | C | 0.40 | 0.03887 | 2.33 |
| SYNPR | 954 | 1505600 | C | 0.33 | 0.04270 | 2.39 |
| SYNPR | 955 | 4616634 | G | 0.33 | 0.04923 | 2.33 |
| FAM19A1 | 983 | 9310118 | G | 0.50 | 0.03501 | 2.31 |
| GBE1 | 988 | 11922101 | T | 0.13 | 0.00579 | 6.15 |
| GBE1 | 997 | 3755713 | C | 0.11 | 0.02588 | 0.26 |
| EPHA6 | 1005 | 4621347 | A | 0.10 | 0.04537 | 4.33 |
| CDGAP | 1023 | 9855065 | A | 0.30 | 0.01662 | 2.92 |
| KALRN | 1041 | 17289013 | T | 0.57 | 0.01923 | 2.52 |
| KALRN | 1042 | 661798 | C | 0.70 | 0.02783 | 2.51 |
| KALRN | 1043 | 3772756 | G | 0.21 | 0.01221 | 3.74 |
| RAB6B | 1061 | 6765093 | G | 0.27 | 0.03951 | 0.41 |
| NLGN1 | 1122 | 10936780 | G | 0.23 | 0.03707 | 2.78 |
| NLGN1 | 1127 | 9828801 | T | 0.20 | 0.04080 | 2.90 |
| PPARGC1A | 1193 | 8192678 | A | 0.13 | 0.01734 | 0.28 |
| CCKAR | 1198 | 2130250 | A | 0.13 | 0.01090 | 0.26 |
| KIAA1239 | 1206 | 17575883 | A | 0.30 | 0.04286 | 2.46 |
| KIAA1239 | 1208 | 2928297 | A | 0.77 | 0.00182 | 3.91 |
| KIAA1239 | 1209 | 2973226 | C | 0.70 | 0.01451 | 2.77 |
| KIAA1239 | 1211 | 1382979 | A | 0.50 | 0.00546 | 3.00 |
| NPFFR2 | 1247 | 4694116 | A | 0.10 | 0.00095 | 17.89 |
| NPFFR2 | 1251 | 1513895 | T | 0.10 | 0.00526 | 9.00 |
| SHROOM3 | 1260 | 9307184 | G | 0.57 | 0.01387 | 2.72 |
| HERC3 | 1274 | 4312724 | C | 0.40 | 0.04325 | 2.29 |
| CAMK2D | 1365 | 10488959 | C | 0.00 | 0.04342 | 0.00 |
| CAMK2D | 1367 | 7680434 | T | 0.00 | 0.04342 | 0.00 |
| GPR103 | 1383 | 7688947 | C | 0.43 | 0.01320 | 2.72 |
| GPR103 | 1384 | 11732033 | A | 0.43 | 0.01320 | 2.72 |
| GPR103 | 1385 | 17438900 | C | 0.43 | 0.01320 | 2.72 |
| MAML3 | 1394 | 2271391 | T | 0.57 | 0.00646 | 2.93 |
| MAML3 | 1399 | 7698089 | T | 0.30 | 0.03766 | 0.42 |
| MAML3 | 1400 | 7656823 | A | 0.30 | 0.03777 | 0.42 |
| MAML3 | 1401 | 4863720 | C | 0.30 | 0.03799 | 0.42 |
| INPP4B | 1422 | 2130685 | T | 0.30 | 0.01930 | 2.87 |
| POU4F2 | 1428 | 6835151 | A | 0.23 | 0.03442 | 2.82 |
| DCLK2 | 1437 | 10001651 | C | 0.00 | 0.00193 | 0.00 |
| DCLK2 | 1438 | 11735949 | C | 0.13 | 0.03114 | 0.31 |
| DCLK2 | 1439 | 17503402 | A | 0.13 | 0.00133 | 0.19 |
| DCLK2 | 1440 | 11727182 | G | 0.13 | 0.00281 | 0.21 |
| DCLK2 | 1442 | 6535725 | A | 0.20 | 0.01445 | 0.32 |
| TLL1 | 1481 | 1391334 | G | 0.54 | 0.02492 | 2.49 |
| TLL1 | 1482 | 1497947 | T | 0.63 | 0.04990 | 2.21 |
| DNAH5 | 1546 | 1971860 | A | 0.33 | 0.03466 | 0.42 |
| DNAH5 | 1567 | 168131 | G | 0.20 | 0.04011 | 0.38 |
| SLC1A3 | 1584 | 2032892 | C | 0.03 | 0.01907 | 2.39 |
| TNPO1 | 1644 | 2548331 | A | 0.27 | 0.02529 | 0.38 |
| CMYA5 | 1652 | 1129770 | A | 0.30 | 0.01191 | 3.09 |
| VCAN | 1664 | 33612 | C | 0.17 | 0.03863 | 0.36 |
| FBXL17 | 1705 | 12515105 | C | 0.60 | 0.02317 | 2.47 |
| FBXL17 | 1706 | 4957550 | G | 0.40 | 0.03712 | 0.44 |
| SNX2 | 1759 | 12109789 | G | 0.17 | 0.04433 | 0.37 |
| SNX24 | 1764 | 6595416 | T | 0.13 | 0.04980 | 0.34 |
| TRPC7 | 1774 | 17170027 | C | 0.20 | 0.04605 | 0.39 |
| SLC17A3 | 1863 | 629444 | T | 0.20 | 0.04080 | 2.90 |
| ELOVL5 | 1890 | 974323 | T | 0.43 | 0.01484 | 2.68 |
| ELOVL5 | 1893 | 9357760 | G | 0.43 | 0.01677 | 2.63 |
| ELOVL5 | 1894 | 9370196 | C | 0.43 | 0.02108 | 2.54 |
| ELOVL5 | 1895 | 9474507 | A | 0.40 | 0.00003 | 5.77 |
| ELOVL5 | 1897 | 9367529 | G | 0.43 | 0.01027 | 2.82 |
| SLC22A16 | 1927 | 9320331 | A | 0.17 | 0.03655 | 0.35 |
| SLC22A16 | 1928 | 9481067 | G | 0.30 | 0.02783 | 0.40 |
| SLC22A16 | 1930 | 7740547 | C | 0.07 | 0.04709 | 0.25 |
| TRDN | 1938 | 1367674 | T | 0.03 | 0.04564 | 0.16 |
| TRDN | 1950 | 6915835 | C | 0.12 | 0.04099 | 0.29 |
| NKAIN2 | 1960 | 163295 | A | 0.60 | 0.00945 | 2.81 |
| NKAIN2 | 1963 | 7751055 | A | 0.23 | 0.03500 | 0.39 |
| EYA4 | 1974 | 17301622 | G | 0.71 | 0.02285 | 2.69 |
| EYA4 | 1976 | 7454561 | G | 0.70 | 0.02379 | 2.57 |
| SYNE1 | 2006 | 1844356 | G | 0.63 | 0.02268 | 2.50 |
| TFB1M | 2009 | 3822964 | C | 0.27 | 0.03951 | 0.41 |
| TFB1M | 2012 | 162978 | A | 0.54 | 0.04178 | 2.29 |
| PARK2 | 2025 | 9355924 | A | 0.57 | 0.04551 | 2.21 |
| PARK2 | 2030 | 9295173 | G | 0.30 | 0.03243 | 0.41 |
| CARD11 | 2067 | 3735124 | C | 0.30 | 0.03944 | 2.50 |
| NPY | 2114 | 16129 | T | 0.25 | 0.01422 | 0.33 |
| NPY | 2115 | 16124 | A | 0.29 | 0.02665 | 0.38 |
| CREB5 | 2119 | 2237361 | C | 0.30 | 0.03810 | 0.42 |
| CHN2 | 2128 | 7781003 | T | 0.17 | 0.03863 | 0.36 |
| SCRN1 | 2136 | 1465327 | T | 0.43 | 0.01822 | 2.67 |
| PLEKHA8 | 2137 | 10488086 | A | 0.30 | 0.00832 | 3.27 |
| PLEKHA8 | 2138 | 17158623 | G | 0.07 | 0.00089 | 3.48 |
| PLEKHA8 | 2139 | 7806238 | A | 0.27 | 0.03062 | 2.74 |
| FLJ22374 | 2150 | 17159526 | G | 0.25 | 0.04469 | 2.67 |
| FLJ22374 | 2151 | 10253781 | T | 0.32 | 0.00290 | 3.84 |
| BMPER | 2169 | 969363 | C | 0.54 | 0.02311 | 2.59 |
| IGFBP3 | 2189 | 10282088 | A | 0.33 | 0.04664 | 2.36 |
| ABCA13 | 2190 | 17132163 | T | 0.20 | 0.01791 | 3.48 |
| ABCA13 | 2191 | 12113721 | A | 0.20 | 0.01791 | 3.48 |
| WBSCR17 | 2238 | 6971383 | A | 0.18 | 0.02082 | 0.32 |
| PPP1R9A | 2377 | 854532 | T | 0.23 | 0.04641 | 0.41 |
| DYNC1I1 | 2397 | 12666041 | A | 0.37 | 0.00854 | 3.03 |
| CADPS2 | 2424 | 2501443 | C | 0.30 | 0.03777 | 0.42 |
| EXOC4 | 2462 | 6966403 | A | 0.20 | 0.03113 | 0.36 |
| EXOC4 | 2466 | 2346442 | A | 0.23 | 0.01663 | 0.34 |
| EXOC4 | 2469 | 10224683 | A | 0.20 | 0.03484 | 0.37 |
| EXOC4 | 2470 | 7792546 | A | 0.20 | 0.03484 | 0.37 |
| DGKI | 2474 | 1731951 | T | 0.30 | 0.01220 | 0.35 |
| DGKI | 2480 | 12707359 | T | 0.67 | 0.00496 | 3.13 |
| CNTNAP2 | 2503 | 3915305 | C | 0.43 | 0.03940 | 2.29 |
| CNTNAP2 | 2504 | 10952682 | G | 0.43 | 0.03940 | 2.29 |
| CNTNAP2 | 2505 | 4726875 | A | 0.57 | 0.04551 | 2.21 |
| CNTNAP2 | 2506 | 1528507 | G | 0.57 | 0.04551 | 2.21 |
| MCPH1 | 2551 | 1530408 | C | 0.33 | 0.03909 | 2.43 |
| SGCZ | 2579 | 9325685 | C | 0.27 | 0.03499 | 0.40 |
| PSD3 | 2603 | 13275817 | A | 0.43 | 0.04370 | 2.26 |
| PEBP4 | 2629 | 17757261 | G | 0.37 | 0.03754 | 2.39 |
| UNC5D | 2640 | 2579898 | G | 0.50 | 0.03736 | 2.28 |
| SNTG1 | 2652 | 10504093 | G | 0.13 | 0.04839 | 3.45 |
| LYN | 2675 | 868541 | A | 0.65 | 0.02167 | 2.69 |
| LYN | 2680 | 2668005 | G | 0.43 | 0.00771 | 2.94 |
| LYN | 2681 | 2668003 | C | 0.40 | 0.01375 | 2.75 |
| NKAIN3 | 2688 | 16928883 | C | 0.30 | 0.00181 | 4.14 |
| NKAIN3 | 2689 | 16928902 | C | 0.27 | 0.00970 | 3.36 |
| NKAIN3 | 2695 | 1901409 | C | 0.60 | 0.02660 | 2.42 |
| NKAIN3 | 2703 | 16929381 | T | 0.27 | 0.03810 | 2.62 |
| NKAIN3 | 2706 | 4739003 | A | 0.23 | 0.03707 | 2.78 |
| NKAIN3 | 2709 | 1156385 | A | 0.53 | 0.00769 | 2.87 |
| NKAIN3 | 2710 | 1383154 | A | 0.33 | 0.03909 | 2.43 |
| NKAIN3 | 2711 | 10504354 | A | 0.50 | 0.01120 | 2.73 |
| KCNB2 | 2738 | 12541900 | G | 0.63 | 0.02155 | 2.52 |
| KCNB2 | 2741 | 2249770 | C | 0.30 | 0.02264 | 2.77 |
| CRISPLD1 | 2755 | 2383928 | T | 0.20 | 0.04362 | 2.87 |
| CRISPLD1 | 2760 | 10100216 | T | 0.13 | 0.00797 | 0.25 |
| GRHL2 | 2775 | 13275653 | C | 0.57 | 0.02411 | 2.50 |
| GRHL2 | 2777 | 4734573 | C | 0.43 | 0.04370 | 2.26 |
| GRHL2 | 2778 | 11994917 | T | 0.50 | 0.02393 | 2.45 |
| NCALD | 2780 | 2387620 | G | 0.47 | 0.02910 | 2.39 |
| NCALD | 2781 | 2226401 | C | 0.37 | 0.02985 | 2.48 |
| BAALC | 2786 | 3956319 | T | 0.00 | 0.02195 | 0.00 |
| ZFPM2 | 2804 | 16873707 | T | 0.17 | 0.02020 | 3.80 |
| ZFPM2 | 2808 | 1372614 | G | 0.20 | 0.04080 | 2.90 |
| DDEF1 | 2862 | 12546206 | A | 0.23 | 0.04641 | 0.41 |
| DDEF1 | 2877 | 1123205 | G | 0.23 | 0.04553 | 0.41 |
| ADCY8 | 2888 | 2860416 | T | 0.27 | 0.02630 | 2.83 |
| ADCY8 | 2895 | 6986982 | A | 0.03 | 0.01092 | 0.11 |
| ADCY8 | 2896 | 7461448 | A | 0.03 | 0.01268 | 0.11 |
| ADCY8 | 2897 | 17327900 | A | 0.00 | 0.02195 | 0.00 |
| ADCY8 | 2898 | 11991124 | T | 0.03 | 0.01377 | 0.12 |
| ADCY8 | 2899 | 10505569 | G | 0.00 | 0.03313 | 0.00 |
| KCNQ3 | 2900 | 977939 | A | 0.27 | 0.03951 | 0.41 |
| SMARCA2 | 2933 | 10116703 | A | 0.67 | 0.02993 | 2.43 |
| PTPRD | 2951 | 7027844 | C | 0.67 | 0.02137 | 2.56 |
| PTPRD | 2952 | 6477333 | A | 0.60 | 0.01340 | 2.67 |
| ADAMTSL1 | 2957 | 574090 | T | 0.20 | 0.01092 | 3.85 |
| ADAMTSL1 | 2958 | 563805 | C | 0.23 | 0.01647 | 3.26 |
| IFT74 | 2983 | 3429 | A | 0.00 | 0.02520 | 0.00 |
| IFT74 | 2984 | 17694631 | C | 0.00 | 0.02421 | 0.00 |
| TEK | 2986 | 10967731 | A | 0.17 | 0.04607 | 0.37 |
| APBA1 | 3000 | 1761287 | G | 0.73 | 0.00082 | 4.08 |
| APBA1 | 3001 | 2781542 | G | 0.50 | 0.00322 | 3.21 |
| APBA1 | 3004 | 11139084 | A | 0.57 | 0.01590 | 2.59 |
| APBA1 | 3005 | 10867730 | T | 0.57 | 0.01590 | 2.59 |
| APBA1 | 3006 | 7872660 | T | 0.37 | 0.00620 | 3.17 |
| APBA1 | 3007 | 7033141 | G | 0.33 | 0.03058 | 2.54 |
| TRPM3 | 3021 | 10780950 | T | 0.33 | 0.02355 | 2.65 |
| NTRK2 | 3072 | 1212171 | C | 0.67 | 0.00739 | 2.97 |
| NTRK2 | 3073 | 1187329 | A | 0.60 | 0.03818 | 2.29 |
| NTRK2 | 3074 | 7867174 | G | 0.50 | 0.00422 | 3.10 |
| NTRK2 | 3075 | 7038866 | A | 0.43 | 0.01677 | 2.63 |
| NTRK2 | 3076 | 13289538 | G | 0.10 | 0.01746 | 5.96 |
| NTRK2 | 3077 | 2799482 | C | 0.57 | 0.00050 | 3.92 |
| NTRK2 | 3078 | 2799483 | C | 0.57 | 0.00050 | 3.92 |
| NTRK2 | 3079 | 1899641 | G | 0.40 | 0.03136 | 2.42 |
| DAPK1 | 3081 | 11141876 | T | 0.21 | 0.04177 | 2.88 |
| SHC3 | 3085 | 9410299 | C | 0.30 | 0.00082 | 0.25 |
| GABBR2 | 3101 | 10985765 | C | 0.27 | 0.02822 | 2.78 |
| FKTN | 3113 | 17251166 | C | 0.13 | 0.04715 | 0.34 |
| FKTN | 3114 | 7851777 | T | 0.13 | 0.04715 | 0.34 |
| SVEP1 | 3127 | 7875389 | C | 0.73 | 0.00439 | 3.36 |
| TTLL11 | 3145 | 10985483 | T | 0.20 | 0.03113 | 0.36 |
| TTLL11 | 3146 | 10120546 | C | 0.20 | 0.04605 | 0.39 |
| RALGPS1 | 3154 | 10987552 | T | 0.53 | 0.03236 | 2.33 |
| VAV2 | 3183 | 7865299 | G | 0.30 | 0.02264 | 2.77 |
| ABCA2 | 3201 | 12337910 | G | 0.21 | 0.02903 | 3.13 |
| MYO3A | 3259 | 7896978 | C | 0.30 | 0.02476 | 2.73 |
| MYO3A | 3279 | 3737316 | T | 0.33 | 0.00478 | 3.41 |
| MYO3A | 3285 | 12764197 | G | 0.36 | 0.00480 | 3.47 |
| NRG3 | 3343 | 17744778 | C | 0.40 | 0.03887 | 2.33 |
| NRG3 | 3347 | 495978 | A | 0.14 | 0.01097 | 0.26 |
| SORCS3 | 3379 | 7099585 | T | 0.43 | 0.02281 | 2.57 |
| ATRNL1 | 3410 | 10787571 | G | 0.11 | 0.03701 | 0.29 |
| ATRNL1 | 3415 | 1590733 | A | 0.29 | 0.04766 | 0.42 |
| ATE1 | 3436 | 1874664 | C | 0.30 | 0.01662 | 2.92 |
| ATE1 | 3437 | 3763753 | T | 0.30 | 0.01824 | 2.88 |
| GALNTL4 | 3470 | 11021734 | C | 0.37 | 0.03487 | 2.43 |
| ARNTL | 3491 | 10766073 | A | 0.13 | 0.04343 | 0.33 |
| ARNTL | 3492 | 10832020 | C | 0.03 | 0.00807 | 0.10 |
| ARNTL | 3494 | 1044432 | T | 0.33 | 0.00688 | 3.23 |
| ARNTL | 3495 | 1044431 | A | 0.32 | 0.01280 | 3.06 |
| DLG2 | 3535 | 10898155 | T | 0.33 | 0.03494 | 0.42 |
| DLG2 | 3536 | 1400313 | A | 0.37 | 0.04233 | 0.44 |
| STYK1 | 3616 | 10743918 | C | 0.54 | 0.02196 | 2.54 |
| PIK3C2G | 3634 | 10743268 | G | 0.60 | 0.01279 | 2.69 |
| KCNC2 | 3656 | 4131955 | T | 0.50 | 0.02118 | 2.49 |
| KCNC2 | 3657 | 7952767 | C | 0.50 | 0.01359 | 2.73 |
| KCNC2 | 3658 | 1526821 | C | 0.50 | 0.02118 | 2.49 |
| KCNC2 | 3659 | 10785167 | T | 0.50 | 0.02578 | 2.42 |
| NAV3 | 3666 | 1677914 | G | 0.18 | 0.03894 | 3.22 |
| NAV3 | 3669 | 1479027 | G | 0.20 | 0.04362 | 2.87 |
| NAV3 | 3671 | 1731743 | G | 0.20 | 0.04362 | 2.87 |
| GAS2L3 | 3682 | 17030333 | T | 0.13 | 0.01380 | 4.89 |
| N4BP2L2 | 3699 | 206336 | G | 0.64 | 0.02909 | 2.48 |
| LMO7 | 3747 | 9593132 | T | 0.13 | 0.04839 | 3.45 |
| GPC5 | 3785 | 17188557 | G | 0.10 | 0.00821 | 0.21 |
| GPC5 | 3787 | 913005 | T | 0.70 | 0.00078 | 3.97 |
| GPC5 | 3789 | 6492630 | A | 0.70 | 0.00707 | 3.06 |
| GPC5 | 3790 | 2148226 | G | 0.13 | 0.00281 | 0.21 |
| GPC5 | 3791 | 9523825 | G | 0.27 | 0.01569 | 0.35 |
| GPC6 | 3795 | 16948547 | G | 0.43 | 0.01320 | 2.72 |
| GPC6 | 3800 | 1323975 | A | 0.13 | 0.04715 | 0.34 |
| GPC6 | 3803 | 3899317 | A | 0.27 | 0.01846 | 0.36 |
| ITGBL1 | 3845 | 7338172 | G | 0.03 | 0.03464 | 0.15 |
| ITGBL1 | 3846 | 3783215 | C | 0.03 | 0.03464 | 0.15 |
| LRFN5 | 3892 | 10149327 | T | 0.17 | 0.00995 | 0.28 |
| PPP2R5E | 3920 | 6573508 | C | 0.07 | 0.01965 | 0.20 |
| PPP2R5E | 3921 | 10137202 | C | 0.00 | 0.00811 | 0.00 |
| PPP2R5E | 3929 | 7154718 | G | 0.10 | 0.02065 | 5.74 |
| RGS6 | 3950 | 2239221 | C | 0.60 | 0.04465 | 2.23 |
| ATP10A | 4010 | 7175557 | C | 0.14 | 0.03709 | 3.69 |
| RYR3 | 4026 | 16973353 | A | 0.30 | 0.04357 | 0.43 |
| RASGRP1 | 4051 | 12324402 | G | 0.10 | 0.02382 | 0.26 |
| GLDN | 4063 | 17648140 | G | 0.17 | 0.01940 | 0.31 |
| CGNL1 | 4067 | 12595188 | G | 0.30 | 0.01662 | 2.92 |
| CGNL1 | 4070 | 7182648 | T | 0.03 | 0.00749 | 0.10 |
| CGNL1 | 4072 | 8034215 | G | 0.07 | 0.00754 | 0.17 |
| TBC1D2B | 4090 | 16969397 | T | 0.23 | 0.02425 | 3.02 |
| ARNT2 | 4101 | 4778800 | T | 0.37 | 0.02342 | 2.59 |
| ARNT2 | 4104 | 4778836 | T | 0.17 | 0.04433 | 0.37 |
| PCSK6 | 4111 | 12595154 | G | 0.60 | 0.04353 | 2.24 |
| A2BP1 | 4131 | 1507031 | A | 0.23 | 0.04036 | 0.40 |
| TMC5 | 4140 | 8059797 | A | 0.50 | 0.04981 | 2.18 |
| MPHOSPH6 | 4178 | 1011433 | C | 0.27 | 0.02037 | 2.95 |
| MPHOSPH6 | 4180 | 2967328 | C | 0.27 | 0.03810 | 2.62 |
| USP10 | 4207 | 7188512 | C | 0.50 | 0.01120 | 2.73 |
| USP10 | 4208 | 964453 | G | 0.37 | 0.02342 | 2.59 |
| USP10 | 4210 | 744839 | T | 0.47 | 0.00756 | 2.90 |
| CA10 | 4232 | 12603762 | C | 0.63 | 0.00320 | 3.24 |
| CA10 | 4235 | 1501253 | G | 0.53 | 0.01613 | 2.59 |
| CA10 | 4237 | 1393735 | G | 0.63 | 0.00399 | 3.16 |
| CA10 | 4238 | 2970016 | G | 0.33 | 0.02168 | 0.39 |
| MSI2 | 4256 | 792402 | A | 0.03 | 0.02702 | 0.14 |
| MSI2 | 4257 | 8066677 | G | 0.13 | 0.02117 | 0.29 |
| HRNBP3 | 4272 | 7212305 | A | 0.00 | 0.02520 | 0.00 |
| HRNBP3 | 4273 | 907898 | C | 0.00 | 0.02782 | 0.00 |
| DLGAP1 | 4278 | 7245298 | G | 0.03 | 0.02018 | 0.13 |
| CDH7 | 4357 | 8093720 | A | 0.20 | 0.04011 | 0.38 |
| CDH7 | 4358 | 1484725 | T | 0.20 | 0.04145 | 0.38 |
| CDH7 | 4361 | 2046407 | G | 0.43 | 0.02108 | 2.54 |
| CDH7 | 4365 | 2628210 | G | 0.37 | 0.02342 | 2.59 |
| ATRN | 4390 | 151511 | A | 0.57 | 0.04551 | 2.21 |
| PLCB1 | 4421 | 2662990 | T | 0.03 | 0.03012 | 0.14 |
| PLCB1 | 4424 | 6086591 | A | 0.43 | 0.04766 | 2.22 |
| MACROD2 | 4451 | 2193028 | C | 0.27 | 0.01064 | 3.32 |
| MACROD2 | 4455 | 6043616 | C | 0.23 | 0.03311 | 2.86 |
| MAPRE1 | 4491 | 2070090 | T | 0.43 | 0.00448 | 3.15 |
| CDH4 | 4534 | 2427144 | A | 0.67 | 0.04706 | 2.26 |
| NCAM2 | 4548 | 2826841 | T | 0.37 | 0.04663 | 2.30 |
| ASPHD2 | 4573 | 16982107 | T | 0.17 | 0.00073 | 7.90 |
| HPS4 | 4574 | 5761552 | T | 0.67 | 0.02553 | 2.49 |
| HPS4 | 4575 | 739291 | C | 0.30 | 0.00564 | 3.48 |
| HPS4 | 4576 | 3747134 | G | 0.30 | 0.00564 | 3.48 |
| HPS4 | 4577 | 5761557 | A | 0.25 | 0.03046 | 2.88 |
| TTLL1 | 4593 | 5996268 | C | 0.17 | 0.04629 | 3.08 |

TABLE 18
Alleles Influencing Discontinuation from Adverse Events for Quetiapine

| | | | | Freq. in | | |
|---|---|---|---|---|---|---|
| | Seq | | | Discon- | | Odds |
| Gene Name | ID | NCBI RS# | Allele | tinuers | P | Ratio |
| KIF1B | 2 | 4846198 | A | 0.30 | 0.0258 | 0.44 |
| RP1-21O18.1 | 18 | 10803354 | A | 0.60 | 0.0111 | 2.45 |
| LRP8 | 56 | 11206139 | G | 0.36 | 0.0387 | 0.48 |
| ELTD1 | 64 | 1352555 | A | 0.45 | 0.0407 | 2.05 |
| ELTD1 | 65 | 4650627 | A | 0.11 | 0.0229 | 0.33 |
| NGF | 80 | 6327 | A | 0.57 | 0.0436 | 2.01 |
| MR1 | 134 | 3845422 | A | 0.32 | 0.0285 | 2.33 |
| KCNK2 | 138 | 10864143 | A | 0.48 | 0.0140 | 2.40 |
| USH2A | 151 | 1339411 | T | 0.32 | 0.0481 | 2.15 |
| ESRRG | 183 | 12033378 | A | 0.27 | 0.0380 | 2.35 |
| RYR2 | 206 | 2010045 | G | 0.62 | 0.0307 | 2.16 |
| RYR2 | 207 | 2618687 | T | 0.52 | 0.0452 | 2.00 |
| CHRM3 | 226 | 479933 | A | 0.11 | 0.0209 | 0.32 |
| CHRM3 | 227 | 663927 | A | 0.11 | 0.0255 | 0.33 |
| FMN2 | 228 | 12118961 | T | 0.61 | 0.0326 | 2.11 |
| FMN2 | 229 | 12145060 | A | 0.55 | 0.0142 | 2.37 |
| FMN2 | 231 | 12123407 | A | 0.57 | 0.0288 | 2.13 |
| FMN2 | 248 | 11799544 | T | 0.00 | 0.0478 | 0.00 |
| FMN2 | 249 | 10926257 | T | 0.00 | 0.0478 | 0.00 |
| FMN2 | 250 | 4659973 | T | 0.25 | 0.0477 | 0.47 |
| RGS7 | 258 | 10802917 | G | 0.36 | 0.0317 | 0.47 |
| DDEF2 | 284 | 10929580 | C | 0.59 | 0.0083 | 2.50 |
| KLHL29 | 289 | 747345 | A | 0.61 | 0.0022 | 2.90 |
| KLHL29 | 290 | 737565 | A | 0.64 | 0.0048 | 2.69 |
| KLHL29 | 291 | 747344 | G | 0.64 | 0.0050 | 2.67 |
| KLHL29 | 292 | 6727901 | G | 0.64 | 0.0065 | 2.60 |
| KLHL29 | 293 | 7570872 | G | 0.50 | 0.0365 | 2.06 |
| KLHL29 | 294 | 10172684 | G | 0.45 | 0.0321 | 2.13 |
| BRE | 322 | 10209422 | T | 0.29 | 0.0034 | 3.49 |
| BRE | 323 | 6747817 | G | 0.27 | 0.0387 | 2.33 |
| CCDC85A | 418 | 4672096 | G | 0.00 | 0.0316 | 0.00 |
| CCDC85A | 424 | 214041 | T | 0.48 | 0.0225 | 2.22 |
| CTNNA2 | 457 | 2165975 | T | 0.23 | 0.0317 | 2.61 |
| CTNNA2 | 458 | 6547299 | A | 0.18 | 0.0023 | 0.29 |
| CTNNA2 | 462 | 17018919 | C | 0.18 | 0.0266 | 2.98 |
| CTNNA2 | 464 | 318362 | C | 0.25 | 0.0338 | 0.44 |
| ARHGAP15 | 539 | 13032052 | C | 0.07 | 0.0416 | 0.29 |
| ARHGAP15 | 544 | 16858944 | A | 0.09 | 0.0435 | 0.34 |
| ARHGAP15 | 545 | 7605182 | C | 0.07 | 0.0498 | 0.30 |
| ARHGAP15 | 546 | 17814502 | A | 0.09 | 0.0067 | 0.24 |
| KIF5C | 562 | 7355478 | T | 0.02 | 0.0262 | 0.14 |
| FMNL2 | 580 | 2577180 | G | 0.32 | 0.0207 | 2.46 |
| FMNL2 | 585 | 11682487 | C | 0.41 | 0.0412 | 2.08 |
| FMNL2 | 586 | 6434113 | C | 0.34 | 0.0325 | 2.24 |
| PLA2R1 | 604 | 949753 | G | 0.34 | 0.0080 | 2.77 |
| ALS2 | 654 | 4675226 | T | 0.11 | 0.0311 | 0.35 |
| CUL3 | 686 | 16866061 | G | 0.48 | 0.0361 | 2.08 |
| IRS1 | 690 | 10205233 | T | 0.11 | 0.0412 | 3.56 |
| IRS1 | 691 | 1560251 | T | 0.18 | 0.0423 | 2.69 |
| COL4A4 | 693 | 10933165 | C | 0.55 | 0.0113 | 2.40 |
| COL4A4 | 695 | 10166736 | A | 0.57 | 0.0114 | 2.40 |
| DNER | 712 | 207671 | G | 0.57 | 0.0231 | 2.19 |
| CNTN6 | 742 | 265799 | G | 0.70 | 0.0137 | 2.45 |
| CNTN6 | 744 | 265767 | A | 0.67 | 0.0054 | 2.73 |
| CNTN6 | 745 | 2055738 | C | 0.71 | 0.0002 | 3.89 |
| CNTN6 | 746 | 3772290 | T | 0.68 | 0.0003 | 3.57 |
| CNTN6 | 754 | 17038701 | G | 0.14 | 0.0351 | 3.26 |
| CNTN4 | 770 | 12497768 | T | 0.57 | 0.0436 | 2.01 |
| IRAK2 | 784 | 6804954 | A | 0.34 | 0.0443 | 0.49 |
| IRAK2 | 785 | 708035 | T | 0.50 | 0.0165 | 2.30 |
| IRAK2 | 786 | 11717636 | C | 0.57 | 0.0407 | 2.03 |
| RARB | 805 | 17525900 | C | 0.18 | 0.0266 | 2.98 |
| CACNA2D2 | 861 | 2298955 | C | 0.20 | 0.0158 | 3.11 |
| CACNA2D2 | 862 | 743757 | C | 0.18 | 0.0423 | 2.69 |
| CACNA2D3 | 867 | 4928040 | A | 0.20 | 0.0314 | 0.42 |
| FLNB | 907 | 9834312 | A | 0.25 | 0.0218 | 0.42 |
| FLNB | 911 | 12632456 | A | 0.23 | 0.0493 | 0.46 |
| FHIT | 921 | 11919495 | A | 0.50 | 0.0024 | 2.89 |
| FHIT | 922 | 9871875 | C | 0.50 | 0.0024 | 2.89 |
| FHIT | 923 | 9834182 | A | 0.50 | 0.0107 | 2.43 |
| FHIT | 929 | 815718 | C | 0.08 | 0.0413 | 0.29 |
| PTPRG | 938 | 1388613 | C | 0.07 | 0.0053 | 0.20 |
| CADPS | 944 | 9311842 | T | 0.07 | 0.0216 | 0.26 |
| MAGI1 | 974 | 9840574 | T | 0.43 | 0.0339 | 2.12 |
| FAM19A1 | 981 | 11707519 | G | 0.25 | 0.0445 | 2.33 |
| GBE1 | 992 | 3772899 | G | 0.34 | 0.0101 | 0.40 |
| HTR1F | 999 | 1027689 | T | 0.16 | 0.0445 | 2.84 |
| PLCXD2 | 1016 | 9288930 | T | 0.30 | 0.0462 | 0.48 |
| ZXDC | 1047 | 1687462 | C | 0.30 | 0.0461 | 0.47 |
| CLSTN2 | 1078 | 6775380 | A | 0.45 | 0.0254 | 2.22 |
| CLSTN2 | 1080 | 347975 | G | 0.45 | 0.0166 | 2.33 |
| CLSTN2 | 1081 | 347973 | A | 0.43 | 0.0359 | 2.18 |
| TNIK | 1100 | 9870583 | C | 0.36 | 0.0230 | 0.44 |
| NLGN1 | 1111 | 10936764 | G | 0.16 | 0.0416 | 0.41 |
| HTR3D | 1129 | 6779545 | A | 0.55 | 0.0409 | 2.03 |
| LEPREL1 | 1139 | 893054 | T | 0.36 | 0.0232 | 2.33 |
| LEPREL1 | 1140 | 573533 | A | 0.36 | 0.0273 | 2.27 |
| SLC2A9 | 1164 | 10023068 | A | 0.36 | 0.0149 | 2.48 |
| SLC2A9 | 1166 | 9291642 | C | 0.27 | 0.0084 | 3.00 |
| SLC2A9 | 1168 | 6820230 | T | 0.18 | 0.0401 | 0.42 |
| LDB2 | 1182 | 1990280 | G | 0.55 | 0.0080 | 2.50 |
| LDB2 | 1184 | 13110882 | G | 0.52 | 0.0111 | 2.41 |
| KIAA1239 | 1206 | 17575883 | A | 0.02 | 0.0104 | 0.11 |
| KIAA1239 | 1207 | 17575897 | T | 0.05 | 0.0147 | 0.19 |
| TBC1D1 | 1212 | 13110318 | A | 0.18 | 0.0105 | 3.67 |
| LIMCH1 | 1225 | 7674006 | C | 0.09 | 0.0317 | 4.70 |
| CXCL9 | 1254 | 10518143 | C | 0.14 | 0.0030 | 0.26 |
| SCD5 | 1262 | 7684732 | C | 0.34 | 0.0429 | 2.14 |
| SCD5 | 1265 | 6811012 | T | 0.30 | 0.0333 | 2.33 |
| SCD5 | 1269 | 6848340 | T | 0.25 | 0.0142 | 2.87 |
| FAM13A1 | 1280 | 7657817 | T | 0.30 | 0.0240 | 2.46 |
| FAM13A1 | 1287 | 1708673 | T | 0.02 | 0.0212 | 0.13 |
| FAMI3A1 | 1288 | 1996139 | A | 0.02 | 0.0262 | 0.14 |
| PDLIM5 | 1291 | 1353044 | T | 0.48 | 0.0002 | 3.78 |
| PDLIM5 | 1292 | 2433325 | A | 0.48 | 0.0002 | 3.78 |
| PDLIM5 | 1293 | 2510777 | C | 0.30 | 0.0054 | 0.36 |
| PDLIM5 | 1295 | 2452600 | T | 0.41 | 0.0141 | 2.42 |
| PDLIM5 | 1297 | 7662466 | A | 0.32 | 0.0185 | 0.43 |
| PDLIM5 | 1299 | 7690296 | G | 0.32 | 0.0499 | 0.49 |
| PDLIM5 | 1300 | 17021918 | T | 0.41 | 0.0217 | 2.29 |
| DKK2 | 1304 | 419764 | T | 0.23 | 0.0280 | 0.42 |
| COL25A1 | 1320 | 11942576 | C | 0.50 | 0.0180 | 2.27 |
| COL25A1 | 1336 | 4256292 | G | 0.41 | 0.0412 | 2.08 |
| ANK2 | 1347 | 10019154 | A | 0.25 | 0.0071 | 0.36 |
| ANK2 | 1348 | 362496 | G | 0.48 | 0.0029 | 2.84 |
| ANK2 | 1349 | 29329 | T | 0.59 | 0.0226 | 2.21 |
| MAML3 | 1387 | 2246759 | G | 0.25 | 0.0035 | 0.33 |
| MAML3 | 1389 | 4863683 | C | 0.36 | 0.0467 | 2.08 |
| MAML3 | 1390 | 6831959 | A | 0.68 | 0.0075 | 2.60 |
| MAML3 | 1391 | 11734419 | G | 0.48 | 0.0090 | 2.50 |
| INPP4B | 1416 | 17015544 | T | 0.05 | 0.0221 | 0.21 |
| INPP4B | 1420 | 336391 | T | 0.18 | 0.0311 | 0.41 |
| INPP4B | 1422 | 2130685 | T | 0.09 | 0.0334 | 0.32 |
| FSTL5 | 1450 | 17041096 | C | 0.43 | 0.0032 | 3.01 |
| FSTL5 | 1451 | 7657675 | A | 0.40 | 0.0060 | 2.77 |
| FSTL5 | 1452 | 4501178 | C | 0.25 | 0.0314 | 2.49 |
| PALLD | 1483 | 6552873 | C | 0.18 | 0.0171 | 0.37 |
| PALLD | 1486 | 9312333 | C | 0.18 | 0.0209 | 0.38 |
| PALLD | 1488 | 10031058 | G | 0.18 | 0.0209 | 0.38 |
| PALLD | 1489 | 10009813 | G | 0.50 | 0.0230 | 2.20 |
| PALLD | 1490 | 6840767 | C | 0.14 | 0.0387 | 0.38 |
| PALLD | 1493 | 2319900 | T | 0.23 | 0.0496 | 0.46 |
| PALLD | 1506 | 4364224 | T | 0.55 | 0.0229 | 2.23 |
| ODZ3 | 1513 | 2675534 | T | 0.09 | 0.0358 | 0.32 |
| ENPP6 | 1525 | 4444870 | T | 0.57 | 0.0145 | 2.33 |
| AHRR | 1531 | 2721004 | T | 0.45 | 0.0193 | 2.28 |
| AHRR | 1532 | 2721012 | G | 0.45 | 0.0039 | 2.84 |
| DNAH5 | 1546 | 1971860 | A | 0.34 | 0.0048 | 0.37 |
| EGFLAM | 1592 | 9292705 | A | 0.14 | 0.0447 | 3.09 |
| EGFLAM | 1596 | 2731979 | C | 0.25 | 0.0017 | 4.03 |
| EGFLAM | 1597 | 2731968 | C | 0.18 | 0.0043 | 4.35 |
| EGFLAM | 1598 | 16903982 | A | 0.14 | 0.0065 | 5.29 |
| ITGA1 | 1604 | 2860025 | T | 0.11 | 0.0458 | 0.37 |
| ITGA1 | 1610 | 2279587 | T | 0.00 | 0.0137 | 0.00 |
| ITGA1 | 1612 | 12520591 | G | 0.00 | 0.0169 | 0.00 |
| ITGA2 | 1620 | 3212576 | G | 0.07 | 0.0175 | 0.25 |
| ITGA2 | 1621 | 7719848 | A | 0.17 | 0.0428 | 0.41 |
| PDE4D | 1635 | 295963 | C | 0.20 | 0.0233 | 2.92 |
| TNPO1 | 1639 | 6452685 | T | 0.26 | 0.0347 | 2.44 |
| VCAN | 1667 | 4558964 | G | 0.14 | 0.0125 | 0.32 |
| ODZ2 | 1788 | 11134468 | G | 0.02 | 0.0397 | 0.15 |
| SLC22A23 | 1812 | 17136575 | G | 0.05 | 0.0182 | 0.20 |
| ATXN1 | 1837 | 3812192 | T | 0.26 | 0.0050 | 0.35 |
| SLC17A3 | 1859 | 1165161 | A | 0.39 | 0.0300 | 2.20 |
| RIMS1 | 1904 | 2463702 | G | 0.34 | 0.0300 | 0.46 |
| RIMS1 | 1915 | 2815743 | T | 0.62 | 0.0382 | 2.09 |
| NKAIN2 | 1954 | 342623 | T | 0.25 | 0.0215 | 2.67 |
| NKAIN2 | 1967 | 1031881 | C | 0.34 | 0.0016 | 3.40 |
| NKAIN2 | 1968 | 6906607 | A | 0.32 | 0.0078 | 2.85 |
| NKAIN2 | 1969 | 609783 | T | 0.32 | 0.0207 | 2.46 |
| PDE7B | 1982 | 4382284 | T | 0.57 | 0.0122 | 2.39 |
| STX11 | 1996 | 4896708 | A | 0.18 | 0.0011 | 0.26 |
| SYNE1 | 2006 | 1844356 | G | 0.52 | 0.0184 | 2.26 |
| SYNE1 | 2008 | 7776230 | T | 0.39 | 0.0441 | 2.08 |
| PDE10A | 2059 | 9459418 | A | 0.36 | 0.0360 | 2.17 |
| NXPH1 | 2083 | 10238726 | G | 0.59 | 0.0009 | 3.18 |
| NXPH1 | 2086 | 7777974 | A | 0.50 | 0.0273 | 2.16 |
| NXPH1 | 2087 | 10257265 | C | 0.45 | 0.0070 | 2.60 |
| NXPH1 | 2088 | 970526 | G | 0.48 | 0.0079 | 2.58 |
| PDE1C | 2160 | 4551232 | A | 0.25 | 0.0212 | 0.42 |
| PDE1C | 2161 | 10225488 | A | 0.25 | 0.0212 | 0.42 |
| BMPER | 2168 | 12672492 | A | 0.09 | 0.0358 | 0.32 |
| BMPER | 2169 | 969363 | C | 0.45 | 0.0169 | 2.38 |
| CDC2L5 | 2184 | 10272641 | G | 0.55 | 0.0233 | 2.19 |
| CDC2L5 | 2185 | 12536726 | G | 0.14 | 0.0284 | 3.53 |
| ABCA13 | 2192 | 6974064 | A | 0.20 | 0.0391 | 2.59 |
| ABCA13 | 2210 | 1918602 | T | 0.12 | 0.0430 | 3.54 |
| WBSCR17 | 2239 | 1012127 | T | 0.43 | 0.0135 | 2.41 |
| WBSCR17 | 2242 | 4585627 | T | 0.48 | 0.0451 | 2.01 |
| HIP1 | 2258 | 757364 | T | 0.33 | 0.0323 | 0.46 |
| MAGI2 | 2267 | 2428920 | C | 0.11 | 0.0209 | 0.32 |
| MAGI2 | 2280 | 1121066 | A | 0.61 | 0.0218 | 2.22 |
| MAGI2 | 2290 | 6954793 | C | 0.23 | 0.0152 | 2.96 |
| PCLO | 2334 | 10240976 | T | 0.66 | 0.0036 | 2.80 |
| SEMA3E | 2342 | 17504676 | G | 0.60 | 0.0335 | 2.12 |
| SEMA3E | 2346 | 1972459 | C | 0.50 | 0.0453 | 2.00 |
| DYNC1I1 | 2396 | 42066 | A | 0.05 | 0.0204 | 0.20 |
| CADPS2 | 2425 | 2428769 | G | 0.25 | 0.0259 | 0.43 |
| GRM8 | 2433 | 1419508 | A | 0.27 | 0.0050 | 0.35 |
| GRM8 | 2434 | 17627206 | T | 0.27 | 0.0080 | 0.38 |
| GRM8 | 2435 | 954661 | T | 0.27 | 0.0080 | 0.38 |
| GRM8 | 2438 | 2283079 | G | 0.30 | 0.0170 | 0.42 |
| GRM8 | 2440 | 10234189 | T | 0.59 | 0.0030 | 2.80 |
| GRM8 | 2441 | 1008907 | T | 0.59 | 0.0039 | 2.72 |
| GRM8 | 2447 | 6951643 | G | 0.27 | 0.0050 | 0.35 |
| GRM8 | 2449 | 6975541 | T | 0.30 | 0.0170 | 0.42 |
| GRM8 | 2450 | 1419442 | T | 0.20 | 0.0244 | 0.40 |
| GRM8 | 2451 | 2106183 | T | 0.41 | 0.0322 | 2.16 |
| CNTNAP2 | 2488 | 1639471 | G | 0.20 | 0.0244 | 0.40 |
| CNTNAP2 | 2492 | 6978796 | A | 0.20 | 0.0258 | 0.41 |
| CSMD1 | 2537 | 622765 | A | 0.27 | 0.0387 | 2.33 |
| MCPH1 | 2551 | 1530408 | C | 0.27 | 0.0192 | 2.63 |
| MCPH1 | 2553 | 2440416 | G | 0.29 | 0.0296 | 2.44 |
| MCPH1 | 2558 | 2920660 | A | 0.25 | 0.0347 | 2.45 |
| MCPH1 | 2566 | 4841224 | T | 0.50 | 0.0213 | 2.23 |
| MCPH1 | 2567 | 3739391 | A | 0.14 | 0.0421 | 0.39 |
| PEBP4 | 2626 | 4872539 | C | 0.14 | 0.0047 | 0.28 |
| PEBP4 | 2627 | 7829416 | G | 0.14 | 0.0059 | 0.29 |
| PEBP4 | 2628 | 6558183 | T | 0.11 | 0.0378 | 0.36 |
| SNTG1 | 2653 | 10957739 | G | 0.36 | 0.0399 | 2.15 |
| SNTG1 | 2671 | 1484128 | T | 0.16 | 0.0132 | 0.34 |
| SNTG1 | 2672 | 1484129 | T | 0.20 | 0.0487 | 0.45 |
| NKAIN3 | 2705 | 975688 | T | 0.45 | 0.0166 | 2.33 |
| NKAIN3 | 2709 | 1156385 | A | 0.45 | 0.0216 | 2.24 |
| NKAIN3 | 2711 | 10504354 | A | 0.45 | 0.0166 | 2.33 |
| KCNB2 | 2743 | 2256675 | A | 0.14 | 0.0245 | 3.63 |
| KCNB2 | 2746 | 2255053 | A | 0.14 | 0.0245 | 3.63 |
| MMP16 | 2765 | 1915023 | T | 0.02 | 0.0138 | 0.12 |
| MMP16 | 2766 | 7821897 | C | 0.02 | 0.0161 | 0.12 |
| GRHL2 | 2773 | 4734553 | G | 0.52 | 0.0406 | 2.03 |
| CSMD3 | 2809 | 6981814 | A | 0.41 | 0.0412 | 2.08 |
| MTSS1 | 2852 | 4871506 | T | 0.39 | 0.0218 | 0.45 |
| SMARCA2 | 2931 | 2147263 | T | 0.30 | 0.0042 | 0.35 |
| SLC1A1 | 2935 | 9886720 | T | 0.36 | 0.0460 | 2.10 |
| SLC1A1 | 2936 | 4742008 | A | 0.39 | 0.0498 | 2.04 |
| RP11-35N6.1 | 3108 | 7853653 | A | 0.48 | 0.0329 | 2.12 |
| VAV2 | 3185 | 10993832 | A | 0.36 | 0.0467 | 2.08 |
| VAV2 | 3189 | 2810473 | T | 0.39 | 0.0498 | 2.04 |
| KCNT1 | 3195 | 497547 | G | 0.09 | 0.0110 | 7.10 |
| KCNT1 | 3196 | 11103147 | G | 0.02 | 0.0442 | 0.16 |
| KCNT1 | 3197 | 11103150 | A | 0.02 | 0.0489 | 0.16 |
| KCNT1 | 3198 | 10858158 | G | 0.02 | 0.0489 | 0.16 |
| KCNT1 | 3199 | 11103157 | C | 0.02 | 0.0489 | 0.16 |
| ABCA2 | 3201 | 12337910 | G | 0.02 | 0.0247 | 0.13 |
| CACNA1B | 3205 | 7391010 | C | 0.07 | 0.0175 | 0.25 |
| VTI1A | 3391 | 3740143 | G | 0.18 | 0.0454 | 0.43 |
| HSPA12A | 3427 | 10787720 | C | 0.20 | 0.0174 | 3.06 |
| ATE1 | 3446 | 10732824 | A | 0.19 | 0.0061 | 4.00 |
| ATE1 | 3447 | 3750835 | A | 0.17 | 0.0200 | 3.40 |
| SPON1 | 3500 | 10832163 | T | 0.25 | 0.0381 | 0.45 |
| SPON1 | 3506 | 10832170 | T | 0.36 | 0.0317 | 0.47 |
| SPON1 | 3507 | 1406356 | A | 0.36 | 0.0258 | 0.46 |
| SPON1 | 3510 | 11023088 | T | 0.64 | 0.0154 | 2.38 |
| DLG2 | 3528 | 2060147 | G | 0.36 | 0.0005 | 3.89 |
| DLG2 | 3530 | 983590 | T | 0.34 | 0.0007 | 3.80 |
| DLG2 | 3532 | 12225388 | A | 0.30 | 0.0030 | 3.36 |
| DLG2 | 3533 | 10898148 | A | 0.31 | 0.0054 | 3.09 |
| DLG2 | 3534 | 7950988 | T | 0.29 | 0.0084 | 2.99 |
| DLG2 | 3543 | 4451754 | A | 0.45 | 0.0443 | 2.02 |
| ELMOD1 | 3556 | 6588969 | A | 0.32 | 0.0094 | 0.39 |
| OPCML | 3566 | 4936168 | C | 0.45 | 0.0216 | 2.24 |
| OPCML | 3579 | 6590700 | C | 0.09 | 0.0435 | 0.34 |
| OPCML | 3582 | 4937780 | G | 0.09 | 0.0400 | 0.33 |
| TSPAN9 | 3593 | 544668 | G | 0.52 | 0.0233 | 2.19 |
| KCNC2 | 3662 | 2471664 | C | 0.09 | 0.0358 | 0.32 |
| PCDH17 | 3735 | 7324697 | A | 0.14 | 0.0167 | 0.33 |
| LMO7 | 3746 | 9318373 | A | 0.39 | 0.0407 | 0.49 |
| GPC6 | 3808 | 4394948 | C | 0.52 | 0.0429 | 2.02 |
| GPC6 | 3822 | 9561551 | C | 0.34 | 0.0482 | 2.11 |
| ITGBL1 | 3849 | 17686597 | C | 0.02 | 0.0305 | 0.14 |
| ITGBL1 | 3850 | 2281991 | G | 0.02 | 0.0377 | 0.15 |
| ITGBL1 | 3852 | 1469853 | G | 0.02 | 0.0323 | 0.14 |
| SLC25A21 | 3888 | 7153409 | A | 0.14 | 0.0245 | 3.63 |
| SLC25A21 | 3889 | 4900678 | C | 0.14 | 0.0284 | 3.53 |
| LRFN5 | 3902 | 10131436 | A | 0.18 | 0.0310 | 0.40 |
| LRFN5 | 3904 | 1033877 | G | 0.45 | 0.0126 | 2.41 |
| GNG2 | 3905 | 8018469 | T | 0.57 | 0.0436 | 2.01 |
| RGS6 | 3950 | 2239221 | C | 0.34 | 0.0365 | 0.48 |
| CCDC88C | 3987 | 11160006 | C | 0.26 | 0.0287 | 0.43 |
| BCL11B | 4001 | 1257446 | C | 0.16 | 0.0215 | 0.37 |
| BCL11B | 4002 | 1257416 | G | 0.20 | 0.0298 | 0.42 |
| KIAA1370 | 4064 | 4776065 | C | 0.18 | 0.0311 | 0.41 |
| TBC1D2B | 4089 | 10519181 | C | 0.16 | 0.0318 | 0.39 |
| TBC1D2B | 4091 | 2241885 | C | 0.30 | 0.0210 | 0.43 |
| TBC1D2B | 4093 | 11634607 | T | 0.20 | 0.0089 | 0.35 |
| TBC1D2B | 4095 | 2867985 | A | 0.18 | 0.0112 | 0.35 |
| A2BP1 | 4114 | 1420058 | C | 0.69 | 0.0127 | 2.49 |
| A2BP1 | 4116 | 8047133 | C | 0.66 | 0.0300 | 2.16 |
| A2BP1 | 4118 | 1155959 | C | 0.61 | 0.0218 | 2.22 |
| A2BP1 | 4119 | 12926215 | G | 0.39 | 0.0087 | 2.64 |
| A2BP1 | 4121 | 4289011 | C | 0.60 | 0.0067 | 2.60 |
| A2BP1 | 4122 | 8055711 | T | 0.50 | 0.0012 | 3.11 |
| WWOX | 4153 | 11641213 | G | 0.32 | 0.0185 | 0.43 |
| WWOX | 4156 | 4887935 | C | 0.48 | 0.0186 | 2.28 |
| CDH13 | 4185 | 7196979 | G | 0.64 | 0.0283 | 2.20 |
| RAB11FIP4 | 4225 | 315431 | T | 0.43 | 0.0430 | 2.05 |
| CA10 | 4232 | 12603762 | C | 0.30 | 0.0462 | 0.48 |
| CA10 | 4234 | 4794315 | G | 0.30 | 0.0462 | 0.48 |
| CA10 | 4241 | 11652641 | G | 0.09 | 0.0435 | 0.34 |
| CA10 | 4243 | 16951177 | C | 0.02 | 0.0053 | 0.09 |
| MSI2 | 4255 | 1007462 | C | 0.64 | 0.0164 | 2.32 |
| HRNBP3 | 4272 | 7212305 | A | 0.25 | 0.0445 | 2.33 |
| PTPRM | 4287 | 503716 | T | 0.00 | 0.0478 | 0.00 |
| NEDD4L | 4325 | 11663936 | T | 0.32 | 0.0028 | 3.27 |
| NEDD4L | 4327 | 12457509 | A | 0.43 | 0.0044 | 2.77 |
| NEDD4L | 4329 | 10513914 | G | 0.43 | 0.0085 | 2.56 |
| NEDD4L | 4330 | 2075405 | G | 0.36 | 0.0107 | 2.59 |
| NEDD4L | 4331 | 4940679 | G | 0.61 | 0.0051 | 2.65 |
| NEDD4L | 4332 | 7242486 | G | 0.61 | 0.0055 | 2.65 |
| CCBE1 | 4336 | 17065761 | C | 0.02 | 0.0262 | 0.14 |
| CCBE1 | 4337 | 12969965 | A | 0.32 | 0.0320 | 2.29 |
| ZNF667 | 4387 | 10423617 | T | 0.33 | 0.0092 | 2.77 |
| RNF24 | 4393 | 6084530 | C | 0.16 | 0.0234 | 0.37 |
| PLCB1 | 4412 | 6055513 | G | 0.61 | 0.0139 | 2.36 |
| PLCB1 | 4414 | 6055577 | A | 0.07 | 0.0325 | 0.28 |
| PLCB1 | 4433 | 4295085 | A | 0.66 | 0.0299 | 2.16 |
| PLCB4 | 4434 | 6086686 | A | 0.66 | 0.0300 | 2.16 |
| MACROD2 | 4447 | 1657969 | T | 0.23 | 0.0430 | 0.45 |
| KIF16B | 4462 | 6043875 | C | 0.52 | 0.0345 | 2.08 |
| PTPRT | 4498 | 746413 | C | 0.66 | 0.0127 | 2.42 |
| PTPRT | 4501 | 6016688 | T | 0.43 | 0.0203 | 2.28 |
| KCNB1 | 4519 | 496511 | C | 0.60 | 0.0273 | 2.18 |
| MIRN155 | 4554 | 2828908 | T | 0.11 | 0.0281 | 0.34 |

TABLE 19
Alleles Influencing Discontinuation from Adverse
Events for Perphenazine

| | | | | Freq. in | | |
|---|---|---|---|---|---|---|
| | Seq | NCBI | | Dis- | | Odds |
| Gene Name | ID | RS# | Allele | continuers | P | Ratio |
| EPHB2 | 23 | 309499 | T | 0.63 | 0.0425 | 2.31 |
| ELTD1 | 67 | 4625238 | T | 0.33 | 0.0444 | 2.45 |
| PRKACB | 74 | 2642186 | G | 0.11 | 0.0060 | 0.20 |
| NGF | 83 | 11102925 | T | 0.07 | 0.0337 | 0.22 |
| KCNK2 | 139 | 2841598 | G | 0.37 | 0.0315 | 0.41 |
| USH2A | 170 | 12030122 | C | 0.23 | 0.0051 | 4.41 |
| ESRRG | 180 | 11117642 | T | 0.23 | 0.0269 | 3.13 |
| RYR2 | 213 | 2685297 | G | 0.07 | 0.0072 | 0.16 |
| RYR2 | 214 | 2249847 | C | 0.18 | 0.0255 | 0.32 |
| FMN2 | 234 | 11801848 | C | 0.53 | 0.0116 | 2.79 |
| FMN2 | 235 | 10926168 | G | 0.67 | 0.0148 | 2.77 |
| FMN2 | 236 | 7520065 | G | 0.67 | 0.0148 | 2.77 |
| RGS7 | 256 | 10802916 | T | 0.20 | 0.0315 | 0.36 |
| PLD5 | 270 | 6673239 | T | 0.20 | 0.0315 | 0.36 |
| HPCAL1 | 285 | 16856020 | T | 0.23 | 0.0297 | 3.07 |
| KCNK3 | 306 | 1275982 | C | 0.23 | 0.0316 | 0.37 |
| KCNK3 | 307 | 11126666 | A | 0.03 | 0.0009 | 0.07 |
| KCNK3 | 308 | 7584568 | G | 0.33 | 0.0185 | 0.37 |
| KCNK3 | 309 | 1627854 | G | 0.37 | 0.0425 | 0.43 |
| BRE | 321 | 6732163 | G | 0.07 | 0.0281 | 0.21 |
| BRE | 323 | 6747817 | G | 0.10 | 0.0451 | 0.29 |
| CDC42EP3 | 343 | 7607934 | G | 0.10 | 0.0248 | 0.26 |
| SLC8A1 | 355 | 17026039 | G | 0.30 | 0.0227 | 2.89 |
| PRKCE | 376 | 666334 | T | 0.50 | 0.0053 | 3.13 |
| ACYP2 | 414 | 2090182 | T | 0.03 | 0.0414 | 0.19 |
| CTNNA2 | 468 | 1444539 | C | 0.20 | 0.0225 | 3.56 |
| NAP5 | 485 | 13392755 | T | 0.57 | 0.0130 | 2.75 |
| LRP1B | 504 | 10469593 | C | 0.10 | 0.0106 | 0.22 |
| LRP1B | 505 | 12479163 | A | 0.10 | 0.0451 | 0.29 |
| LRP1B | 507 | 4447563 | G | 0.10 | 0.0005 | 0.14 |
| KYNU | 534 | 3768844 | C | 0.30 | 0.0227 | 2.89 |
| ARHGAP15 | 550 | 6732131 | A | 0.17 | 0.0082 | 0.27 |
| ARHGAP15 | 553 | 6750323 | C | 0.17 | 0.0082 | 0.27 |
| ARHGAP15 | 554 | 4334442 | C | 0.10 | 0.0248 | 0.26 |
| ARHGAP15 | 555 | 10197021 | T | 0.23 | 0.0422 | 0.39 |
| ARHGAP15 | 557 | 11693600 | C | 0.57 | 0.0333 | 2.38 |
| FMNL2 | 579 | 2346182 | G | 0.50 | 0.0286 | 2.44 |
| FMNL2 | 586 | 6434113 | C | 0.07 | 0.0171 | 0.19 |
| SCN9A | 624 | 7589835 | A | 0.27 | 0.0228 | 3.05 |
| CERKL | 632 | 895901 | A | 0.50 | 0.0453 | 2.26 |
| PDE1A | 648 | 9332425 | T | 0.23 | 0.0351 | 0.38 |
| PARD3B | 655 | 1861763 | C | 0.33 | 0.0328 | 2.60 |
| PARD3B | 656 | 1019357 | G | 0.33 | 0.0328 | 2.60 |
| PARD3B | 667 | 1079943 | G | 0.17 | 0.0066 | 0.26 |
| COL4A3 | 698 | 6741679 | A | 0.50 | 0.0172 | 2.65 |
| TRIP12 | 728 | 17324331 | G | 0.47 | 0.0411 | 2.32 |
| CNTN6 | 746 | 3772290 | T | 0.57 | 0.0412 | 2.30 |
| CNTN4 | 768 | 13077493 | T | 0.07 | 0.0404 | 0.23 |
| CNTN4 | 773 | 11920374 | A | 0.50 | 0.0332 | 2.39 |
| ATP2B2 | 791 | 11719939 | G | 0.07 | 0.0281 | 0.21 |
| ATP2B2 | 792 | 6763274 | C | 0.07 | 0.0310 | 0.22 |
| ARPP-21 | 820 | 1963934 | C | 0.40 | 0.0257 | 2.59 |
| ARPP-21 | 821 | 4678802 | C | 0.67 | 0.0334 | 2.45 |
| CACNA2D3 | 865 | 4928009 | A | 0.40 | 0.0165 | 2.78 |
| CACNA2D3 | 866 | 9825455 | A | 0.33 | 0.0444 | 2.45 |
| ERC2 | 888 | 1485672 | T | 0.10 | 0.0045 | 0.19 |
| ERC2 | 890 | 9873480 | C | 0.11 | 0.0025 | 0.17 |
| ERC2 | 891 | 11708280 | A | 0.10 | 0.0053 | 0.20 |
| ERC2 | 892 | 6765986 | C | 0.10 | 0.0061 | 0.20 |
| ERC2 | 894 | 4974206 | G | 0.17 | 0.0153 | 0.30 |
| ERC2 | 895 | 13064525 | C | 0.13 | 0.0154 | 0.27 |
| FLNB | 908 | 2259091 | C | 0.50 | 0.0202 | 2.59 |
| PRICKLE2 | 960 | 17664984 | T | 0.04 | 0.0296 | 0.14 |
| PRICKLE2 | 962 | 153729 | A | 0.32 | 0.0193 | 2.98 |
| MAGI1 | 971 | 7649739 | G | 0.18 | 0.0334 | 0.34 |
| MAGI1 | 977 | 6445525 | C | 0.33 | 0.0345 | 0.41 |
| MAGI1 | 978 | 4688632 | G | 0.33 | 0.0409 | 0.42 |
| FAM19A1 | 980 | 6548986 | T | 0.53 | 0.0313 | 2.40 |
| RAB6B | 1061 | 6765093 | G | 0.60 | 0.0140 | 2.73 |
| EPHB1 | 1069 | 13314927 | G | 0.40 | 0.0294 | 2.53 |
| LEPREL1 | 1134 | 1666486 | A | 0.37 | 0.0318 | 2.54 |
| LEPREL1 | 1135 | 1447935 | T | 0.33 | 0.0496 | 2.41 |
| LRRC15 | 1148 | 4974514 | A | 0.53 | 0.0313 | 2.40 |
| SLC2A9 | 1155 | 1401438 | T | 0.30 | 0.0454 | 2.52 |
| PPARGC1A | 1195 | 6448226 | G | 0.27 | 0.0458 | 0.41 |
| SOD3 | 1196 | 17622933 | T | 0.47 | 0.0093 | 2.94 |
| NPFFR2 | 1239 | 4574375 | G | 0.07 | 0.0044 | 2.61 |
| NPFFR2 | 1248 | 9790741 | G | 0.17 | 0.0498 | 0.37 |
| SHROOM3 | 1255 | 3943037 | G | 0.43 | 0.0021 | 3.83 |
| SHROOM3 | 1256 | 13138237 | G | 0.43 | 0.0058 | 3.19 |
| SHROOM3 | 1258 | 4276307 | A | 0.23 | 0.0422 | 0.39 |
| FAM13A1 | 1286 | 1398938 | T | 0.20 | 0.0225 | 3.56 |
| FAM13A1 | 1287 | 1708673 | T | 0.20 | 0.0347 | 3.19 |
| FAM13A1 | 1288 | 1996139 | A | 0.20 | 0.0347 | 3.19 |
| COL25A1 | 1320 | 11942576 | C | 0.20 | 0.0261 | 0.35 |
| COL25A1 | 1329 | 794149 | G | 0.50 | 0.0453 | 2.26 |
| CAMK2D | 1368 | 17532826 | A | 0.33 | 0.0328 | 2.60 |
| GPR103 | 1383 | 7688947 | C | 0.07 | 0.0483 | 0.24 |
| MAML3 | 1401 | 4863720 | C | 0.63 | 0.0208 | 2.61 |
| IL15 | 1406 | 4254850 | C | 0.67 | 0.0148 | 2.77 |
| INPP4B | 1423 | 2627802 | T | 0.33 | 0.0278 | 0.40 |
| DCLK2 | 1434 | 10002404 | A | 0.60 | 0.0380 | 2.35 |
| TLL1 | 1479 | 3756016 | C | 0.20 | 0.0473 | 0.39 |
| PALLD | 1500 | 13122019 | A | 0.64 | 0.0298 | 2.54 |
| PALLD | 1507 | 1071738 | C | 0.57 | 0.0081 | 3.02 |
| PALLD | 1508 | 13116548 | T | 0.50 | 0.0008 | 4.00 |
| PALLD | 1509 | 11733251 | A | 0.50 | 0.0022 | 3.52 |
| PALLD | 1510 | 10518037 | T | 0.50 | 0.0027 | 3.43 |
| PALLD | 1511 | 6843588 | G | 0.57 | 0.0167 | 2.65 |
| PALLD | 1512 | 2331450 | A | 0.50 | 0.0027 | 3.43 |
| ITGA1 | 1606 | 10513001 | G | 0.03 | 0.0469 | 0.16 |
| THBS4 | 1654 | 385771 | C | 0.03 | 0.0071 | 0.10 |
| THBS4 | 1655 | 366471 | G | 0.03 | 0.0071 | 0.10 |
| THBS4 | 1656 | 256447 | C | 0.03 | 0.0087 | 0.10 |
| THBS4 | 1657 | 256444 | C | 0.07 | 0.0233 | 0.21 |
| THBS4 | 1661 | 7736549 | A | 0.04 | 0.0160 | 0.12 |
| MEF2C | 1676 | 700592 | G | 0.63 | 0.0054 | 3.14 |
| MEF2C | 1677 | 304151 | C | 0.50 | 0.0022 | 3.52 |
| MEF2C | 1678 | 4518438 | T | 0.65 | 0.0271 | 2.66 |
| MEF2C | 1679 | 3850651 | C | 0.57 | 0.0333 | 2.38 |
| FBXL17 | 1717 | 4957554 | C | 0.20 | 0.0261 | 0.35 |
| HSD17B4 | 1742 | 246965 | G | 0.27 | 0.0089 | 0.32 |
| LOC340069 | 1746 | 328694 | A | 0.30 | 0.0334 | 0.40 |
| TRPC7 | 1774 | 17170027 | C | 0.17 | 0.0394 | 0.35 |
| ODZ2 | 1790 | 13158058 | T | 0.17 | 0.0026 | 0.23 |
| PHACTR1 | 1821 | 12526453 | C | 0.17 | 0.0498 | 0.37 |
| ATXN1 | 1835 | 235147 | A | 0.20 | 0.0144 | 0.31 |
| SLC17A4 | 1846 | 9348694 | T | 0.40 | 0.0218 | 2.67 |
| SLC17A4 | 1848 | 1892248 | T | 0.40 | 0.0300 | 2.51 |
| SLC17A2 | 1865 | 3799371 | T | 0.53 | 0.0087 | 2.91 |
| SLC17A2 | 1866 | 6938233 | T | 0.53 | 0.0087 | 2.91 |
| SLC17A2 | 1867 | 2071297 | C | 0.53 | 0.0087 | 2.91 |
| SLC17A2 | 1868 | 442601 | C | 0.13 | 0.0274 | 0.30 |
| SLC17A2 | 1869 | 9467646 | G | 0.53 | 0.0104 | 2.84 |
| SLC17A2 | 1870 | 9467652 | G | 0.53 | 0.0116 | 2.79 |
| SLC17A2 | 1871 | 199739 | T | 0.13 | 0.0330 | 0.31 |
| BTNL2 | 1876 | 3806156 | T | 0.23 | 0.0291 | 0.37 |
| RIMS1 | 1898 | 530028 | G | 0.64 | 0.0390 | 2.41 |
| RIMS1 | 1899 | 511211 | C | 0.63 | 0.0425 | 2.31 |
| TRDN | 1936 | 2873479 | A | 0.20 | 0.0205 | 3.63 |
| TRDN | 1943 | 12178740 | G | 0.00 | 0.0450 | 0.00 |
| TRDN | 1944 | 4509144 | T | 0.00 | 0.0450 | 0.00 |
| TRDN | 1946 | 6902416 | G | 0.00 | 0.0450 | 0.00 |
| TRDN | 1947 | 9490794 | T | 0.00 | 0.0450 | 0.00 |
| NKAIN2 | 1955 | 9490937 | C | 0.07 | 0.0391 | 8.64 |
| EYA4 | 1977 | 9385647 | C | 0.20 | 0.0379 | 0.37 |
| PARK2 | 2016 | 2064419 | G | 0.33 | 0.0278 | 0.40 |
| PARK2 | 2018 | 3765474 | C | 0.27 | 0.0320 | 0.39 |
| PARK2 | 2019 | 992037 | T | 0.17 | 0.0124 | 0.29 |
| PARK2 | 2022 | 6455738 | A | 0.17 | 0.0186 | 0.31 |
| PARK2 | 2034 | 6930880 | C | 0.18 | 0.0334 | 0.34 |
| PARK2 | 2035 | 2023079 | C | 0.17 | 0.0394 | 0.35 |
| PARK2 | 2047 | 9365473 | T | 0.33 | 0.0368 | 2.55 |
| PDE10A | 2055 | 484842 | G | 0.03 | 0.0469 | 0.16 |
| CARD11 | 2066 | 2679258 | A | 0.70 | 0.0486 | 2.33 |
| SDK1 | 2073 | 663486 | T | 0.30 | 0.0326 | 2.70 |
| SDK1 | 2074 | 663466 | A | 0.30 | 0.0227 | 2.89 |
| NXPH1 | 2090 | 6962955 | A | 0.25 | 0.0134 | 0.32 |
| SCIN | 2094 | 849760 | C | 0.20 | 0.0379 | 0.37 |
| CREB5 | 2121 | 6977628 | T | 0.07 | 0.0247 | 0.21 |
| CREB5 | 2126 | 886750 | A | 0.10 | 0.0451 | 0.29 |
| SCRN1 | 2129 | 9912 | T | 0.40 | 0.0119 | 2.93 |
| FLJ22374 | 2145 | 7781249 | A | 0.23 | 0.0042 | 0.28 |
| FLJ22374 | 2147 | 10258097 | A | 0.63 | 0.0230 | 2.56 |
| CDC2L5 | 2186 | 3800802 | T | 0.46 | 0.0309 | 2.49 |
| CDC2L5 | 2187 | 10277422 | C | 0.37 | 0.0168 | 2.84 |
| GTF2IRD1 | 2253 | 6964833 | C | 0.43 | 0.0360 | 2.40 |
| HIP1 | 2257 | 1018945 | G | 0.30 | 0.0182 | 0.36 |
| MAGI2 | 2282 | 10259665 | A | 0.10 | 0.0106 | 0.22 |
| CACNA2D1 | 2303 | 12535840 | G | 0.30 | 0.0490 | 0.43 |
| PCLO | 2311 | 17156675 | T | 0.47 | 0.0290 | 2.46 |
| ABCB4 | 2348 | 31659 | C | 0.23 | 0.0051 | 4.41 |
| ABCB4 | 2351 | 31662 | A | 0.23 | 0.0096 | 3.89 |
| DYNC1I1 | 2389 | 2171555 | A | 0.17 | 0.0467 | 3.29 |
| DYNC1I1 | 2394 | 2299277 | T | 0.37 | 0.0118 | 3.01 |
| KCND2 | 2411 | 10276880 | G | 0.10 | 0.0045 | 13.67 |
| KCND2 | 2417 | 12154976 | T | 0.37 | 0.0234 | 2.68 |
| KCND2 | 2418 | 2189974 | C | 0.37 | 0.0458 | 2.39 |
| SLC13A1 | 2426 | 1404836 | C | 0.07 | 0.0310 | 0.22 |
| DGKI | 2477 | 4728414 | C | 0.57 | 0.0076 | 2.96 |
| DGKI | 2478 | 1528103 | C | 0.57 | 0.0076 | 2.96 |
| DGKI | 2479 | 10268638 | A | 0.50 | 0.0361 | 2.35 |
| CNTNAP2 | 2487 | 1639481 | G | 0.64 | 0.0383 | 2.42 |
| CNTNAP2 | 2496 | 7802708 | G | 0.17 | 0.0153 | 0.30 |
| MCPH1 | 2574 | 7844367 | C | 0.17 | 0.0467 | 3.29 |
| KCNB2 | 2754 | 2981104 | C | 0.23 | 0.0413 | 2.84 |
| NCALD | 2780 | 2387620 | G | 0.50 | 0.0453 | 2.26 |
| FER1L6 | 2833 | 4242352 | C | 0.43 | 0.0461 | 2.29 |
| MTSS1 | 2852 | 4871506 | T | 0.33 | 0.0341 | 0.41 |
| KCNQ3 | 2901 | 2597363 | G | 0.17 | 0.0261 | 3.87 |
| NTRK2 | 3074 | 7867174 | G | 0.10 | 0.0027 | 0.18 |
| NTRK2 | 3075 | 7038866 | A | 0.07 | 0.0025 | 0.13 |
| NTRK2 | 3077 | 2799482 | C | 0.04 | 0.0005 | 0.06 |
| NTRK2 | 3078 | 2799483 | C | 0.07 | 0.0012 | 0.12 |
| NTRK2 | 3079 | 1899641 | G | 0.07 | 0.0020 | 0.13 |
| STOM | 3142 | 2196311 | G | 0.27 | 0.0308 | 2.86 |
| RALGPS1 | 3160 | 10987576 | A | 0.03 | 0.0469 | 0.16 |
| ABL1 | 3167 | 2855190 | C | 0.03 | 0.0469 | 0.16 |
| ABCA2 | 3201 | 12337910 | G | 0.20 | 0.0205 | 3.63 |
| PRKCQ | 3226 | 806399 | A | 0.40 | 0.0447 | 2.35 |
| PRKCQ | 3228 | 2236380 | T | 0.47 | 0.0472 | 2.27 |
| PRKCQ | 3230 | 4748667 | A | 0.23 | 0.0164 | 0.34 |
| CACNB2 | 3239 | 729245 | A | 0.47 | 0.0411 | 2.32 |
| MYO3A | 3267 | 993397 | A | 0.53 | 0.0178 | 2.63 |
| MYO3A | 3288 | 3006844 | G | 0.25 | 0.0295 | 0.37 |
| JMJD1C | 3299 | 10761747 | G | 0.40 | 0.0300 | 2.51 |
| JMJD1C | 3301 | 9629895 | A | 0.37 | 0.0318 | 2.54 |
| JMJD1C | 3303 | 2893922 | C | 0.37 | 0.0007 | 4.55 |
| CDH23 | 3313 | 4747195 | T | 0.40 | 0.0342 | 2.46 |
| CDH23 | 3314 | 4747197 | T | 0.40 | 0.0394 | 2.40 |
| VTI1A | 3401 | 17585548 | G | 0.37 | 0.0359 | 2.49 |
| ATE1 | 3439 | 7075881 | T | 0.03 | 0.0414 | 0.20 |
| ATE1 | 3444 | 10749429 | T | 0.03 | 0.0414 | 2.37 |
| CTBP2 | 3454 | 769160 | C | 0.00 | 0.0173 | 0.00 |
| GALNTL4 | 3468 | 4910288 | A | 0.53 | 0.0484 | 2.23 |
| MICAL2 | 3473 | 1159649 | C | 0.07 | 0.0016 | 0.13 |
| STYK1 | 3609 | 1078437 | G | 0.53 | 0.0313 | 2.40 |
| STYK1 | 3611 | 3759259 | A | 0.53 | 0.0342 | 2.37 |
| STYK1 | 3612 | 10845187 | C | 0.53 | 0.0428 | 2.29 |
| STYK1 | 3615 | 10845198 | T | 0.60 | 0.0140 | 2.73 |
| LOC729025 | 3630 | 11056890 | C | 0.07 | 0.0193 | 0.20 |
| MTIF3 | 3689 | 1885990 | A | 0.30 | 0.0454 | 2.52 |
| UBL3 | 3698 | 9578147 | G | 0.23 | 0.0053 | 0.29 |
| PCDH17 | 3736 | 4884285 | T | 0.37 | 0.0234 | 2.68 |
| GPC5 | 3778 | 1330469 | T | 0.60 | 0.0109 | 2.83 |
| GPC6 | 3794 | 1008993 | T | 0.03 | 0.0106 | 0.11 |
| GPC6 | 3795 | 16948547 | G | 0.07 | 0.0192 | 0.20 |
| NALCN | 3824 | 625331 | C | 0.03 | 0.0327 | 0.14 |
| NALCN | 3825 | 676602 | A | 0.00 | 0.0220 | 0.00 |
| NALCN | 3837 | 3916910 | C | 0.10 | 0.0262 | 0.26 |
| ITGBL1 | 3840 | 875116 | C | 0.10 | 0.0148 | 0.23 |
| ITGBL1 | 3841 | 915343 | T | 0.07 | 0.0373 | 0.23 |
| ITGBL1 | 3842 | 1296174 | A | 0.07 | 0.0447 | 0.24 |
| ITGBL1 | 3846 | 3783215 | C | 0.07 | 0.0281 | 0.21 |
| ITGBL1 | 3847 | 1436261 | C | 0.07 | 0.0483 | 0.24 |
| NOVA1 | 3862 | 2144335 | A | 0.36 | 0.0240 | 2.78 |
| SLC25A21 | 3882 | 2022601 | A | 0.36 | 0.0313 | 0.40 |
| SLC25A21 | 3885 | 1367029 | T | 0.36 | 0.0248 | 0.38 |
| SLC25A21 | 3886 | 10140136 | A | 0.13 | 0.0164 | 0.27 |
| SLC25A21 | 3887 | 9806037 | G | 0.17 | 0.0250 | 0.32 |
| SAMD4A | 3910 | 11626634 | A | 0.23 | 0.0028 | 5.00 |
| PPP2R5E | 3922 | 7140704 | G | 0.30 | 0.0099 | 3.37 |
| PPP2R5E | 3924 | 10152067 | G | 0.29 | 0.0442 | 2.65 |
| GLDN | 4062 | 17648128 | A | 0.57 | 0.0315 | 2.40 |
| GLDN | 4063 | 17648140 | G | 0.57 | 0.0333 | 2.38 |
| A2BP1 | 4118 | 1155959 | C | 0.53 | 0.0313 | 2.40 |
| A2BP1 | 4119 | 12926215 | G | 0.07 | 0.0131 | 0.18 |
| A2BP1 | 4120 | 1492382 | C | 0.07 | 0.0175 | 0.19 |
| A2BP1 | 4121 | 4289011 | C | 0.20 | 0.0453 | 0.38 |
| TMC5 | 4142 | 2353696 | T | 0.47 | 0.0472 | 2.27 |
| EEF2K | 4144 | 8059561 | C | 0.10 | 0.0217 | 0.25 |
| EEF2K | 4145 | 10521118 | A | 0.20 | 0.0205 | 3.63 |
| CDH13 | 4191 | 1862832 | T | 0.27 | 0.0458 | 0.41 |
| CDH13 | 4201 | 1833965 | A | 0.17 | 0.0186 | 0.31 |
| CRISPLD2 | 4214 | 2934477 | A | 0.27 | 0.0458 | 0.41 |
| CA10 | 4226 | 11867674 | G | 0.27 | 0.0056 | 0.30 |
| CA10 | 4229 | 985758 | G | 0.13 | 0.0154 | 0.27 |
| CA10 | 4230 | 4794295 | T | 0.27 | 0.0056 | 0.30 |
| SDK2 | 4263 | 7219778 | A | 0.27 | 0.0173 | 0.35 |
| HRNBP3 | 4274 | 4313839 | C | 0.20 | 0.0453 | 0.38 |
| OSBPL1A | 4308 | 2077984 | C | 0.03 | 0.0414 | 0.14 |
| NEDD4L | 4321 | 1008899 | A | 0.03 | 0.0273 | 0.14 |
| NEDD4L | 4322 | 292456 | G | 0.13 | 0.0395 | 0.32 |
| NEDD4L | 4324 | 4941375 | C | 0.03 | 0.0306 | 0.14 |
| CDH7 | 4355 | 7237421 | T | 0.53 | 0.0248 | 2.49 |
| CDH7 | 4356 | 8092259 | G | 0.50 | 0.0405 | 2.37 |
| PRNT | 4399 | 2065705 | C | 0.21 | 0.0485 | 0.38 |
| PLCB1 | 4412 | 6055513 | G | 0.67 | 0.0282 | 2.51 |
| PLCB1 | 4417 | 16994533 | G | 0.30 | 0.0451 | 2.55 |
| KIF16B | 4463 | 4814474 | A | 0.60 | 0.0224 | 2.54 |
| KIF16B | 4465 | 2328019 | C | 0.23 | 0.0240 | 0.36 |
| KIF16B | 4474 | 12624938 | A | 0.32 | 0.0275 | 2.79 |
| SEC23B | 4485 | 1022681 | A | 0.03 | 0.0079 | 0.10 |
| SEC23B | 4486 | 1555354 | C | 0.07 | 0.0212 | 0.20 |
| PTPRT | 4502 | 6124439 | A | 0.10 | 0.0377 | 0.28 |
| CDH4 | 4539 | 6089573 | A | 0.73 | 0.0096 | 3.30 |
| PDE9A | 4563 | 2245730 | C | 0.70 | 0.0093 | 3.03 |
| PDE9A | 4564 | 12626774 | C | 0.17 | 0.0226 | 0.32 |
| ARVCF | 4569 | 2073746 | A | 0.43 | 0.0080 | 3.06 |
| ARFGAP3 | 4579 | 2024645 | T | 0.63 | 0.0050 | 3.17 |
| ARFGAP3 | 4580 | 5758965 | A | 0.63 | 0.0116 | 2.83 |
| ARFGAP3 | 4583 | 4822208 | T | 0.63 | 0.0276 | 2.49 |
| PACSIN2 | 4584 | 12166809 | A | 0.64 | 0.0031 | 3.51 |
| PACSIN2 | 4585 | 5759013 | A | 0.63 | 0.0041 | 3.25 |
| PACSIN2 | 4586 | 4820494 | C | 0.63 | 0.0041 | 3.25 |
| PACSIN2 | 4587 | 1071960 | C | 0.43 | 0.0210 | 2.62 |
| PACSIN2 | 4588 | 7286299 | A | 0.60 | 0.0469 | 2.27 |

TABLE 20
Alleles Influencing Discontinuation from
Adverse Events for Ziprasidone

| | | | | Freq. in | | |
|---|---|---|---|---|---|---|
| Gene | Seq | | | Discon- | | Odds |
| Name | ID | NCBI # | Correct | tinuers | P | Ratio |
| RP1-21O18.1 | 12 | 2175771 | C | 0.09 | 0.0354 | 0.22 |
| AGBL4-C1orf165 | 28 | 11205538 | C | 0.59 | 0.0415 | 2.72 |
| SCP2 | 42 | 6588458 | A | 0.14 | 0.0427 | 5.68 |
| FAM78B | 112 | 6662013 | T | 0.14 | 0.0239 | 0.24 |
| FAM78B | 117 | 1002160 | A | 0.41 | 0.0067 | 4.09 |
| FAM78B | 118 | 7521995 | C | 0.40 | 0.0177 | 3.56 |
| FAM78B | 119 | 715421 | A | 0.45 | 0.0071 | 3.91 |
| FAM78B | 120 | 10800198 | C | 0.45 | 0.0181 | 3.28 |
| DPT | 121 | 6427142 | G | 0.00 | 0.0466 | 0.00 |
| PLA2G4A | 137 | 12720662 | T | 0.41 | 0.0019 | 5.15 |
| USH2A | 159 | 1805049 | G | 0.59 | 0.0042 | 4.04 |
| USH2A | 160 | 2274117 | G | 0.59 | 0.0042 | 4.04 |
| USH2A | 162 | 773498 | G | 0.59 | 0.0042 | 4.04 |
| USH2A | 167 | 773042 | T | 0.50 | 0.0074 | 3.80 |
| ESRRG | 171 | 1833036 | A | 0.68 | 0.0127 | 3.47 |
| ESRRG | 172 | 12757165 | G | 0.59 | 0.0035 | 4.18 |
| ESRRG | 173 | 6658528 | T | 0.64 | 0.0448 | 2.68 |
| ESRRG | 174 | 11117612 | G | 0.59 | 0.0042 | 4.04 |
| RYR2 | 197 | 1806641 | C | 0.27 | 0.0463 | 0.36 |
| RYR2 | 202 | 12048201 | G | 0.00 | 0.0236 | 0.00 |
| RYR2 | 209 | 3766871 | A | 0.14 | 0.0427 | 5.68 |
| CHRM3 | 219 | 7513746 | G | 0.23 | 0.0303 | 0.31 |
| CHRM3 | 220 | 6429154 | G | 0.23 | 0.0391 | 0.33 |
| CHRM3 | 222 | 1431719 | G | 0.23 | 0.0391 | 0.33 |
| CHRM3 | 225 | 10802801 | A | 0.23 | 0.0391 | 0.33 |
| FMN2 | 228 | 12118961 | T | 0.73 | 0.0273 | 3.14 |
| FMN2 | 230 | 6698474 | A | 0.68 | 0.0311 | 2.95 |
| FMN2 | 231 | 12123407 | A | 0.68 | 0.0408 | 2.79 |
| FMN2 | 233 | 11591010 | C | 0.00 | 0.0378 | 0.00 |
| PLD5 | 271 | 1548160 | C | 0.14 | 0.0424 | 0.27 |
| PLD5 | 272 | 12128054 | A | 0.14 | 0.0308 | 0.26 |
| DDEF2 | 283 | 10593 | G | 0.18 | 0.0224 | 5.41 |
| BRE | 313 | 7572644 | C | 0.00 | 0.0373 | 0.00 |
| PLEKHH2 | 360 | 12621654 | T | 0.14 | 0.0498 | 0.29 |
| PRKCE | 378 | 1464572 | T | 0.68 | 0.0120 | 3.52 |
| PRKCE | 386 | 13003856 | G | 0.59 | 0.0477 | 2.62 |
| PRKCE | 387 | 6748375 | C | 0.18 | 0.0315 | 0.29 |
| EPAS1 | 393 | 7589621 | A | 0.41 | 0.0115 | 3.69 |
| CCDC85A | 424 | 214041 | T | 0.18 | 0.0404 | 0.31 |
| CTNNA2 | 451 | 53915 | G | 0.50 | 0.0173 | 3.22 |
| CTNNA2 | 454 | 1006607 | G | 0.27 | 0.0068 | 5.33 |
| CTNNA2 | 456 | 2120408 | C | 0.27 | 0.0068 | 5.33 |
| CTNNA2 | 457 | 2165975 | T | 0.27 | 0.0068 | 5.33 |
| NAP5 | 476 | 13414473 | C | 0.59 | 0.0135 | 3.33 |
| UBXD2 | 496 | 6430585 | A | 0.09 | 0.0448 | 0.23 |
| UBXD2 | 497 | 1042712 | C | 0.05 | 0.0174 | 0.12 |
| PLA2R1 | 610 | 2715936 | G | 0.00 | 0.0373 | 0.00 |
| PDE1A | 640 | 833119 | C | 0.27 | 0.0481 | 3.19 |
| PARD3B | 657 | 2878473 | C | 0.32 | 0.0418 | 3.08 |
| ERBB4 | 683 | 4672668 | G | 0.27 | 0.0358 | 0.34 |
| DNER | 711 | 2396644 | A | 0.45 | 0.0224 | 3.13 |
| CNTN6 | 735 | 6798321 | C | 0.36 | 0.0339 | 0.35 |
| CNTN6 | 736 | 11925058 | C | 0.25 | 0.0064 | 0.23 |
| CNTN6 | 737 | 3772339 | T | 0.18 | 0.0142 | 0.25 |
| CNTN6 | 738 | 4286413 | T | 0.17 | 0.0079 | 0.19 |
| CNTN4 | 767 | 12494838 | G | 0.45 | 0.0465 | 2.69 |
| CNTN4 | 771 | 11129386 | A | 0.23 | 0.0391 | 0.33 |
| SLC6A6 | 798 | 11713355 | A | 0.32 | 0.0146 | 3.97 |
| STAC | 823 | 4678874 | G | 0.36 | 0.0350 | 3.05 |
| ULK4 | 839 | 7649806 | A | 0.27 | 0.0463 | 0.36 |
| ERC2 | 902 | 17216615 | C | 0.14 | 0.0427 | 5.68 |
| FHIT | 917 | 802778 | A | 0.00 | 0.0297 | 0.00 |
| FHIT | 929 | 815718 | C | 0.32 | 0.0418 | 3.08 |
| CADPS | 949 | 11925708 | A | 0.64 | 0.0448 | 2.68 |
| CADPS | 950 | 968808 | T | 0.65 | 0.0235 | 3.18 |
| CADPS | 952 | 9825965 | C | 0.64 | 0.0448 | 2.68 |
| SYNPR | 953 | 1812207 | A | 0.68 | 0.0226 | 3.14 |
| SYNPR | 956 | 7618831 | T | 0.60 | 0.0359 | 2.89 |
| CPNE4 | 1059 | 2178385 | A | 0.59 | 0.0264 | 2.95 |
| RAB6B | 1061 | 6765093 | G | 0.14 | 0.0185 | 0.23 |
| EPHB1 | 1063 | 7650345 | G | 0.14 | 0.0393 | 0.27 |
| EPHB1 | 1068 | 1870196 | T | 0.09 | 0.0448 | 0.23 |
| CLSTN2 | 1073 | 6439926 | A | 0.23 | 0.0500 | 0.34 |
| SPSB4 | 1084 | 4683550 | C | 0.14 | 0.0143 | 10.89 |
| SPSB4 | 1086 | 2086180 | G | 0.14 | 0.0427 | 5.68 |
| NLGN1 | 1121 | 692457 | A | 0.64 | 0.0186 | 3.18 |
| NLGN1 | 1122 | 10936780 | G | 0.20 | 0.0050 | 9.00 |
| NLGN1 | 1123 | 692486 | G | 0.64 | 0.0186 | 3.18 |
| NLGN1 | 1124 | 12634066 | A | 0.18 | 0.0074 | 8.22 |
| NLGN1 | 1125 | 11713211 | C | 0.59 | 0.0477 | 2.62 |
| NLGN1 | 1127 | 9828801 | T | 0.14 | 0.0389 | 5.84 |
| HTR3C | 1131 | 6443938 | A | 0.64 | 0.0305 | 2.92 |
| LDB2 | 1177 | 157613 | G | 0.14 | 0.0389 | 5.84 |
| LDB2 | 1179 | 158278 | G | 0.14 | 0.0389 | 5.84 |
| LDB2 | 1180 | 150261 | C | 0.14 | 0.0101 | 11.84 |
| SLIT2 | 1191 | 9992591 | C | 0.64 | 0.0095 | 3.57 |
| SOD3 | 1196 | 17622933 | T | 0.10 | 0.0427 | 0.23 |
| KIAA1239 | 1205 | 1435378 | G | 0.09 | 0.0497 | 0.24 |
| UBE2K | 1214 | 1003212 | T | 0.23 | 0.0313 | 4.06 |
| NPFFR2 | 1234 | 1520503 | T | 0.18 | 0.0187 | 0.26 |
| CXCL9 | 1254 | 10518143 | C | 0.05 | 0.0080 | 0.10 |
| SCD5 | 1261 | 4693474 | C | 0.55 | 0.0263 | 2.95 |
| SCD5 | 1264 | 993380 | A | 0.55 | 0.0263 | 2.95 |
| FAM13A1 | 1281 | 4544678 | C | 0.32 | 0.0311 | 0.34 |
| FAM13A1 | 1282 | 7691186 | G | 0.32 | 0.0311 | 0.34 |
| FAM13A1 | 1283 | 6814344 | G | 0.36 | 0.0448 | 0.37 |
| FAM13A1 | 1284 | 13131633 | T | 0.36 | 0.0448 | 0.37 |
| COL25A1 | 1317 | 2305438 | A | 0.59 | 0.0477 | 2.62 |
| COL25A1 | 1327 | 3096507 | C | 0.15 | 0.0403 | 0.27 |
| ANK2 | 1345 | 967099 | T | 0.18 | 0.0315 | 0.29 |
| ANK2 | 1348 | 362496 | G | 0.09 | 0.0278 | 0.20 |
| GPR103 | 1381 | 13110738 | G | 0.00 | 0.0047 | 0.00 |
| GPR103 | 1382 | 2013332 | A | 0.05 | 0.0361 | 0.14 |
| IL15 | 1405 | 10519613 | A | 0.00 | 0.0466 | 0.00 |
| INPP4B | 1416 | 17015544 | T | 0.23 | 0.0356 | 3.94 |
| INPP4B | 1424 | 1391099 | G | 0.00 | 0.0345 | 0.00 |
| DCLK2 | 1433 | 10014161 | C | 0.80 | 0.0026 | 5.50 |
| DCLK2 | 1436 | 7665011 | A | 0.77 | 0.0052 | 4.43 |
| DCLK2 | 1438 | 11735949 | C | 0.64 | 0.0134 | 3.37 |
| DCLK2 | 1442 | 6535725 | A | 0.68 | 0.0311 | 2.95 |
| CTSO | 1449 | 10517625 | C | 0.32 | 0.0418 | 3.08 |
| FSTL5 | 1471 | 1994770 | A | 0.23 | 0.0303 | 0.31 |
| ENPP6 | 1522 | 7696176 | C | 0.23 | 0.0097 | 0.25 |
| ENPP6 | 1523 | 6831986 | C | 0.23 | 0.0176 | 0.28 |
| ENPP6 | 1524 | 17679120 | A | 0.32 | 0.0408 | 0.36 |
| DNAH5 | 1560 | 1445823 | C | 0.59 | 0.0120 | 3.41 |
| CDH10 | 1574 | 7731953 | T | 0.00 | 0.0378 | 0.00 |
| CDH10 | 1576 | 983446 | T | 0.05 | 0.0058 | 0.09 |
| EGFLAM | 1589 | 2434504 | A | 0.64 | 0.0339 | 2.84 |
| EGFLAM | 1591 | 1428263 | C | 0.55 | 0.0396 | 2.82 |
| ITGA1 | 1599 | 13189973 | T | 0.41 | 0.0420 | 2.82 |
| ITGA1 | 1606 | 10513001 | G | 0.45 | 0.0328 | 2.89 |
| VCAN | 1672 | 3096172 | C | 0.05 | 0.0455 | 0.15 |
| GPR98 | 1684 | 10062714 | T | 0.27 | 0.0358 | 0.34 |
| GPR98 | 1687 | 16868980 | C | 0.10 | 0.0032 | 0.13 |
| GPR98 | 1688 | 2366926 | G | 0.14 | 0.0060 | 0.19 |
| FBXL17 | 1708 | 286769 | T | 0.10 | 0.0341 | 0.21 |
| HSD17B4 | 1738 | 2636968 | G | 0.77 | 0.0003 | 6.66 |
| HSD17B4 | 1740 | 32662 | T | 0.23 | 0.0071 | 0.24 |
| HSD17B4 | 1741 | 463098 | A | 0.77 | 0.0005 | 6.28 |
| HSD17B4 | 1742 | 246965 | G | 0.77 | 0.0005 | 6.17 |
| HSD17B4 | 1743 | 246968 | A | 0.68 | 0.0008 | 5.26 |
| LOC340069 | 1746 | 328694 | A | 0.68 | 0.0234 | 3.11 |
| SNCAIP | 1753 | 304379 | C | 0.27 | 0.0114 | 0.27 |
| SNCAIP | 1755 | 1841972 | C | 0.36 | 0.0350 | 3.05 |
| SNCAIP | 1756 | 11241644 | G | 0.36 | 0.0350 | 3.05 |
| SNX2 | 1758 | 4343835 | C | 0.23 | 0.0391 | 0.33 |
| SNX2 | 1760 | 2407403 | G | 0.59 | 0.0191 | 3.13 |
| SNX24 | 1762 | 246286 | T | 0.64 | 0.0059 | 3.88 |
| SNX24 | 1763 | 246266 | C | 0.64 | 0.0062 | 3.92 |
| CTNNA1 | 1780 | 1828187 | G | 0.50 | 0.0213 | 3.11 |
| CTNNA1 | 1782 | 176382 | G | 0.50 | 0.0251 | 3.00 |
| CTNNA1 | 1783 | 10038162 | A | 0.50 | 0.0251 | 3.00 |
| CTNNA1 | 1784 | 9327829 | T | 0.50 | 0.0251 | 3.00 |
| CTNNA1 | 1785 | 3763016 | G | 0.50 | 0.0251 | 3.00 |
| CTNNA1 | 1786 | 10045605 | C | 0.50 | 0.0251 | 3.00 |
| GABRP | 1805 | 3792811 | G | 0.59 | 0.0191 | 3.13 |
| SERPINB6 | 1806 | 1358869 | C | 0.23 | 0.0391 | 0.33 |
| PHACTR1 | 1823 | 12527257 | C | 0.05 | 0.0104 | 0.10 |
| PHACTR1 | 1824 | 9367368 | C | 0.05 | 0.0111 | 0.10 |
| RNF144B | 1840 | 6927687 | C | 0.05 | 0.0365 | 0.14 |
| RNF144B | 1843 | 531481 | T | 0.41 | 0.0284 | 3.07 |
| RNF144B | 1844 | 527984 | T | 0.40 | 0.0411 | 2.95 |
| TJAP1 | 1887 | 1096699 | A | 0.50 | 0.0307 | 2.90 |
| GABRR2 | 1918 | 282128 | A | 0.73 | 0.0207 | 3.29 |
| GABRR2 | 1920 | 6900958 | T | 0.14 | 0.0308 | 0.26 |
| KLHL32 | 1925 | 1206149 | A | 0.59 | 0.0446 | 2.67 |
| NKAIN2 | 1958 | 163284 | A | 0.59 | 0.0120 | 3.41 |
| NKAIN2 | 1959 | 12195023 | T | 0.50 | 0.0028 | 4.43 |
| NKAIN2 | 1961 | 163291 | A | 0.59 | 0.0304 | 2.89 |
| EYA4 | 1977 | 9385647 | C | 0.64 | 0.0066 | 3.79 |
| UTRN | 1997 | 601873 | A | 0.23 | 0.0401 | 0.33 |
| UTRN | 1999 | 760855 | T | 0.09 | 0.0098 | 0.16 |
| UTRN | 2001 | 7765923 | A | 0.09 | 0.0183 | 0.18 |
| UTRN | 2002 | 6906465 | G | 0.45 | 0.0101 | 3.84 |
| SLC22A3 | 2015 | 2048327 | G | 0.50 | 0.0251 | 3.00 |
| PARK2 | 2032 | 6455807 | G | 0.14 | 0.0239 | 0.24 |
| PARK2 | 2034 | 6930880 | C | 0.18 | 0.0404 | 0.31 |
| CARD11 | 2066 | 2679258 | A | 0.27 | 0.0463 | 0.36 |
| CARD11 | 2069 | 4722277 | T | 0.23 | 0.0098 | 0.25 |
| SDK1 | 2076 | 10951446 | A | 0.27 | 0.0469 | 0.35 |
| SDK1 | 2080 | 651245 | A | 0.55 | 0.0491 | 2.60 |
| NXPH1 | 2086 | 7777974 | A | 0.64 | 0.0012 | 4.90 |
| NXPH1 | 2087 | 10257265 | C | 0.50 | 0.0143 | 3.35 |
| NXPH1 | 2088 | 970526 | G | 0.50 | 0.0212 | 3.22 |
| SCIN | 2092 | 2240571 | G | 0.64 | 0.0448 | 2.68 |
| NPY | 2114 | 16129 | T | 0.27 | 0.0274 | 0.32 |
| NPY | 2115 | 16124 | A | 0.27 | 0.0358 | 0.34 |
| BMPER | 2163 | 11978741 | T | 0.09 | 0.0448 | 0.23 |
| BMPER | 2164 | 6975236 | T | 0.59 | 0.0063 | 3.78 |
| GRB10 | 2215 | 2244347 | C | 0.14 | 0.0141 | 0.22 |
| WBSCR17 | 2233 | 10950240 | A | 0.30 | 0.0337 | 0.33 |
| WBSCR17 | 2237 | 11768233 | A | 0.55 | 0.0363 | 2.77 |
| MAGI2 | 2266 | 6466021 | G | 0.36 | 0.0482 | 2.86 |
| MAGI2 | 2283 | 7789445 | A | 0.23 | 0.0276 | 4.18 |
| CACNA2D1 | 2312 | 2368020 | A | 0.45 | 0.0057 | 4.04 |
| CACNA2D1 | 2314 | 1468400 | A | 0.45 | 0.0042 | 4.31 |
| CACNA2D1 | 2315 | 7788848 | A | 0.45 | 0.0094 | 3.69 |
| PCLO | 2327 | 17282763 | C | 0.18 | 0.0404 | 0.31 |
| PCLO | 2328 | 12539066 | T | 0.55 | 0.0037 | 4.20 |
| PCLO | 2330 | 976714 | T | 0.64 | 0.0030 | 4.30 |
| PCLO | 2331 | 7778238 | C | 0.77 | 0.0071 | 4.22 |
| PCLO | 2332 | 2190045 | C | 0.18 | 0.0030 | 0.19 |
| SEMA3E | 2340 | 2249188 | G | 0.68 | 0.0408 | 2.79 |
| SEMA3E | 2343 | 215274 | C | 0.23 | 0.0176 | 0.28 |
| SEMA3E | 2345 | 3801562 | C | 0.23 | 0.0232 | 0.29 |
| PPP1R9A | 2365 | 6465455 | T | 0.27 | 0.0207 | 0.30 |
| PPP1R9A | 2369 | 961262 | C | 0.27 | 0.0155 | 0.29 |
| DYNC1I1 | 2379 | 1478984 | G | 0.09 | 0.0261 | 0.20 |
| PON1 | 2385 | 13223537 | C | 0.41 | 0.0420 | 2.82 |
| DYNC1I1 | 2386 | 1382620 | A | 0.09 | 0.0216 | 0.19 |
| DYNC1I1 | 2387 | 983350 | T | 0.09 | 0.0216 | 0.19 |
| DYNC1I1 | 2388 | 983352 | T | 0.09 | 0.0261 | 0.20 |
| CUX1 | 2403 | 425964 | T | 0.27 | 0.0068 | 5.33 |
| CUX1 | 2405 | 427039 | T | 0.27 | 0.0278 | 3.70 |
| SLC13A1 | 2427 | 2222510 | A | 0.14 | 0.0048 | 0.18 |
| SLC13A1 | 2428 | 2462152 | G | 0.14 | 0.0060 | 0.19 |
| SLC13A1 | 2429 | 6963735 | C | 0.68 | 0.0003 | 6.00 |
| PTPRN2 | 2518 | 6943534 | T | 0.50 | 0.0488 | 2.62 |
| PTPRN2 | 2519 | 4909289 | A | 0.45 | 0.0475 | 2.70 |
| PTPRN2 | 2524 | 6960916 | A | 0.50 | 0.0488 | 2.62 |
| PTPRN2 | 2525 | 6966663 | G | 0.50 | 0.0488 | 2.62 |
| PTPRN2 | 2532 | 10265417 | T | 0.64 | 0.0429 | 2.72 |
| PTPRN2 | 2533 | 10081235 | A | 0.64 | 0.0448 | 2.68 |
| CSMD1 | 2538 | 4875250 | G | 0.41 | 0.0004 | 6.82 |
| PSD3 | 2608 | 6992325 | C | 0.41 | 0.0115 | 3.69 |
| PSD3 | 2611 | 1492289 | C | 0.64 | 0.0095 | 3.57 |
| PSD3 | 2612 | 4921968 | A | 0.55 | 0.0263 | 2.95 |
| PSD3 | 2614 | 11778310 | G | 0.45 | 0.0328 | 2.89 |
| PEBP4 | 2626 | 4872539 | C | 0.50 | 0.0074 | 3.75 |
| PEBP4 | 2627 | 7829416 | G | 0.50 | 0.0093 | 3.63 |
| PEBP4 | 2628 | 6558183 | T | 0.45 | 0.0009 | 5.50 |
| UNC5D | 2641 | 1439158 | G | 0.14 | 0.0498 | 0.29 |
| PRKDC | 2650 | 4873770 | T | 0.09 | 0.0079 | 3.19 |
| SNTG1 | 2654 | 6999728 | A | 0.32 | 0.0036 | 5.44 |
| SNTG1 | 2655 | 2106156 | A | 0.05 | 0.0130 | 0.11 |
| SNTG1 | 2656 | 1000638 | T | 0.05 | 0.0174 | 0.12 |
| SNTG1 | 2660 | 12548940 | C | 0.05 | 0.0284 | 0.13 |
| SNTG1 | 2670 | 7832799 | A | 0.41 | 0.0497 | 2.72 |
| NKAIN3 | 2691 | 2084799 | C | 0.27 | 0.0359 | 0.34 |
| NKAIN3 | 2693 | 7835901 | C | 0.64 | 0.0186 | 3.18 |
| GRHL2 | 2776 | 4734037 | C | 0.27 | 0.0481 | 3.19 |
| GRHL2 | 2778 | 11994917 | T | 0.55 | 0.0233 | 3.03 |
| GRHL2 | 2779 | 1131862 | G | 0.36 | 0.0222 | 3.38 |
| NCALD | 2780 | 2387620 | G | 0.45 | 0.0328 | 2.89 |
| NCALD | 2781 | 2226401 | C | 0.36 | 0.0075 | 4.25 |
| BAALC | 2787 | 13279226 | A | 0.32 | 0.0418 | 3.08 |
| SAMD12 | 2829 | 2460983 | G | 0.32 | 0.0418 | 3.08 |
| DDEF1 | 2858 | 3871 | C | 0.45 | 0.0465 | 2.69 |
| DDEF1 | 2863 | 7838372 | T | 0.27 | 0.0170 | 4.25 |
| DDEF1 | 2864 | 6991714 | A | 0.05 | 0.0361 | 0.14 |
| DDEF1 | 2867 | 2670886 | C | 0.30 | 0.0281 | 3.64 |
| DDEF1 | 2874 | 2670882 | G | 0.27 | 0.0481 | 3.19 |
| COL22A1 | 2907 | 4475485 | T | 0.18 | 0.0224 | 5.41 |
| COL22A1 | 2914 | 13279213 | A | 0.41 | 0.0420 | 2.82 |
| SMARCA2 | 2929 | 7048976 | G | 0.36 | 0.0448 | 0.37 |
| PTPRD | 2941 | 12555585 | G | 0.32 | 0.0256 | 3.47 |
| PTPRD | 2943 | 10124689 | T | 0.14 | 0.0498 | 0.29 |
| TRPM6 | 3045 | 7045338 | T | 0.18 | 0.0315 | 0.29 |
| TRPM6 | 3049 | 7024831 | A | 0.09 | 0.0129 | 0.17 |
| PCSK5 | 3058 | 10124834 | T | 0.05 | 0.0455 | 0.15 |
| NTRX2 | 3079 | 1899641 | G | 0.09 | 0.0448 | 0.23 |
| DAPK1 | 3082 | 6560011 | C | 0.18 | 0.0142 | 0.25 |
| SVEP1 | 3124 | 963143 | A | 0.59 | 0.0446 | 2.67 |
| SVEP1 | 3126 | 10759422 | C | 0.36 | 0.0411 | 2.95 |
| DAB2IP | 3143 | 10985431 | T | 0.32 | 0.0076 | 4.60 |
| TSC1 | 3181 | 11243940 | G | 0.50 | 0.0354 | 2.80 |
| TSC1 | 3182 | 7035308 | A | 0.50 | 0.0354 | 2.80 |
| KCNT1 | 3195 | 497547 | G | 0.18 | 0.0224 | 5.41 |
| ABCA2 | 3201 | 12337910 | G | 0.25 | 0.0217 | 4.47 |
| PITRM1 | 3215 | 3740607 | G | 0.32 | 0.0311 | 0.34 |
| PITRM1 | 3217 | 4242746 | T | 0.09 | 0.0087 | 0.16 |
| PITRM1 | 3220 | 3829918 | G | 0.14 | 0.0239 | 0.24 |
| MYO3A | 3259 | 7896978 | C | 0.09 | 0.0354 | 0.22 |
| MYO3A | 3260 | 11014839 | A | 0.09 | 0.0354 | 0.22 |
| MYO3A | 3265 | 6482521 | C | 0.14 | 0.0101 | 11.84 |
| MYO3A | 3266 | 872754 | G | 0.14 | 0.0101 | 11.84 |
| MYO3A | 3270 | 1339814 | T | 0.36 | 0.0411 | 2.95 |
| MYO3A | 3271 | 11014917 | A | 0.05 | 0.0174 | 0.12 |
| MYO3A | 3273 | 5012431 | C | 0.41 | 0.0358 | 0.36 |
| MYO3A | 3274 | 12773856 | C | 0.41 | 0.0358 | 0.36 |
| MYO3A | 3276 | 2139795 | G | 0.41 | 0.0358 | 0.36 |
| MYO3A | 3278 | 3758449 | C | 0.41 | 0.0358 | 0.36 |
| MYO3A | 3287 | 3781117 | C | 0.05 | 0.0284 | 0.13 |
| CDH23 | 3307 | 10999947 | A | 0.45 | 0.0328 | 2.89 |
| VTI1A | 3395 | 2044366 | C | 0.00 | 0.0070 | 0.00 |
| VT11A | 3396 | 11196051 | G | 0.05 | 0.0104 | 0.10 |
| VTI1A | 3397 | 10885371 | A | 0.05 | 0.0321 | 0.14 |
| ATRNL1 | 3418 | 2068463 | C | 0.27 | 0.0207 | 0.30 |
| ATE1 | 3431 | 1693688 | C | 0.68 | 0.0013 | 4.94 |
| ATE1 | 3432 | 2935718 | C | 0.64 | 0.0186 | 3.18 |
| ATE1 | 3433 | 7086628 | C | 0.64 | 0.0448 | 2.68 |
| ATE1 | 3435 | 1219505 | T | 0.68 | 0.0127 | 3.47 |
| MICAL2 | 3475 | 2010463 | A | 0.64 | 0.0002 | 6.07 |
| MICAL2 | 3476 | 10831750 | T | 0.50 | 0.0115 | 3.47 |
| MICAL2 | 3477 | 7117171 | G | 0.50 | 0.0074 | 3.75 |
| MICAL2 | 3478 | 17477949 | T | 0.25 | 0.0120 | 0.26 |
| MICAL2 | 3479 | 954428 | G | 0.64 | 0.0030 | 4.30 |
| DLG2 | 3540 | 11233954 | A | 0.00 | 0.0186 | 0.00 |
| DLG2 | 3547 | 11234221 | A | 0.59 | 0.0191 | 3.13 |
| DLG2 | 3548 | 11234222 | A | 0.59 | 0.0191 | 3.13 |
| OPCML | 3578 | 6590699 | T | 0.41 | 0.0185 | 3.36 |
| OPCML | 3581 | 7935298 | A | 0.41 | 0.0185 | 3.36 |
| OPCML | 3582 | 4937780 | G | 0.41 | 0.0185 | 3.36 |
| OPCML | 3586 | 12792779 | T | 0.35 | 0.0228 | 3.55 |
| OPCML | 3587 | 7108670 | C | 0.41 | 0.0185 | 3.36 |
| OPCML | 3589 | 4936195 | G | 0.40 | 0.0007 | 6.57 |
| TSPAN9 | 3595 | 10774140 | C | 0.09 | 0.0354 | 0.22 |
| LOC729025 | 3618 | 10219568 | A | 0.64 | 0.0448 | 2.68 |
| PIK3C2G | 3633 | 11043979 | C | 0.60 | 0.0474 | 2.72 |
| ITPR2 | 3637 | 16930669 | C | 0.20 | 0.0380 | 4.38 |
| ITPR2 | 3639 | 7955200 | C | 0.45 | 0.0224 | 3.13 |
| CNOT2 | 3642 | 10879096 | G | 0.05 | 0.0455 | 0.15 |
| KCNC2 | 3661 | 10735985 | G | 0.64 | 0.0134 | 3.37 |
| MTIF3 | 3688 | 3759433 | T | 0.32 | 0.0256 | 3.47 |
| SLC46A3 | 3693 | 1617234 | C | 0.64 | 0.0448 | 2.68 |
| UBL3 | 3697 | 9551767 | C | 0.14 | 0.0081 | 0.20 |
| UBL3 | 3698 | 9578147 | G | 0.14 | 0.0081 | 0.20 |
| NBEA | 3719 | 7320580 | G | 0.50 | 0.0143 | 3.35 |
| NBEA | 3720 | 7988705 | A | 0.50 | 0.0173 | 3.22 |
| NBEA | 3722 | 3818423 | C | 0.50 | 0.0173 | 3.22 |
| NBEA | 3723 | 17769661 | T | 0.36 | 0.0411 | 2.95 |
| TRPC4 | 3732 | 1538146 | T | 0.23 | 0.0232 | 0.29 |
| GPC5 | 3792 | 17267453 | C | 0.14 | 0.0427 | 5.68 |
| GPC6 | 3812 | 9301916 | C | 0.09 | 0.0098 | 0.16 |
| GPC6 | 3813 | 9524268 | T | 0.09 | 0.0098 | 0.16 |
| NALCN | 3823 | 16958230 | G | 0.23 | 0.0046 | 7.16 |
| NALCN | 3824 | 625331 | C | 0.27 | 0.0278 | 3.70 |
| NALCN | 3830 | 2390576 | G | 0.41 | 0.0477 | 0.38 |
| NALCN | 3832 | 1538240 | C | 0.80 | 0.0215 | 3.79 |
| NALCN | 3833 | 518212 | G | 0.18 | 0.0244 | 0.27 |
| ITGBL1 | 3838 | 7998372 | T | 0.82 | 0.0079 | 4.50 |
| NOVA1 | 3857 | 1473722 | G | 0.05 | 0.0284 | 0.13 |
| NOVA1 | 3858 | 17111388 | C | 0.05 | 0.0321 | 0.14 |
| NOVA1 | 3859 | 3794485 | C | 0.05 | 0.0284 | 0.13 |
| NPAS3 | 3867 | 243284 | G | 0.59 | 0.0477 | 2.62 |
| NPAS3 | 3871 | 10133530 | A | 0.27 | 0.0278 | 3.70 |
| GNG2 | 3907 | 4898721 | C | 0.05 | 0.0361 | 0.14 |
| GNG2 | 3908 | 10138800 | A | 0.64 | 0.0339 | 2.84 |
| RGS6 | 3931 | 36340 | A | 0.25 | 0.0460 | 0.33 |
| RGS6 | 3935 | 11623588 | T | 0.73 | 0.0111 | 3.70 |
| RGS6 | 3936 | 10151019 | A | 0.09 | 0.0448 | 0.23 |
| RGS6 | 3938 | 1076317 | C | 0.77 | 0.0132 | 3.78 |
| RGS6 | 3939 | 1568404 | T | 0.77 | 0.0176 | 3.58 |
| RGS6 | 3942 | 1520332 | T | 0.18 | 0.0244 | 0.27 |
| RGS6 | 3946 | 1099968 | G | 0.14 | 0.0424 | 0.27 |
| RGS6 | 3948 | 2190508 | C | 0.14 | 0.0498 | 0.29 |
| KCNK10 | 3962 | 12587003 | C | 0.36 | 0.0311 | 3.17 |
| CCDC88C | 3987 | 11160006 | C | 0.23 | 0.0391 | 0.33 |
| CCDC88C | 3988 | 10139287 | A | 0.61 | 0.0048 | 4.40 |
| ATP10A | 4015 | 4906620 | C | 0.05 | 0.0135 | 0.11 |
| RYR3 | 4018 | 2251107 | G | 0.59 | 0.0191 | 3.13 |
| RYR3 | 4029 | 4780144 | C | 0.09 | 0.0079 | 0.38 |
| GLDN | 4057 | 16964316 | A | 0.14 | 0.0389 | 5.84 |
| GLDN | 4059 | 16964319 | T | 0.14 | 0.0389 | 5.84 |
| GLDN | 4060 | 10163098 | G | 0.14 | 0.0389 | 5.84 |
| GLDN | 4061 | 12443092 | C | 0.14 | 0.0389 | 5.84 |
| CGNL1 | 4068 | 4774257 | G | 0.05 | 0.0135 | 0.11 |
| RORA | 4078 | 12914584 | G | 0.59 | 0.0027 | 4.33 |
| RORA | 4080 | 1657792 | A | 0.32 | 0.0311 | 0.34 |
| SH3GL3 | 4107 | 17158811 | A | 0.14 | 0.0011 | 2.89 |
| EEF2K | 4148 | 4275840 | T | 0.05 | 0.0409 | 0.15 |
| USP10 | 4209 | 3829554 | G | 0.18 | 0.0315 | 0.29 |
| CA10 | 4231 | 203010 | T | 0.32 | 0.0311 | 0.34 |
| CA10 | 4233 | 203042 | A | 0.64 | 0.0448 | 2.68 |
| CA10 | 4240 | 1503058 | A | 0.30 | 0.0192 | 0.29 |
| ZFP161 | 4285 | 12605370 | C | 0.18 | 0.0224 | 5.41 |
| ZFP161 | 4286 | 12604181 | T | 0.23 | 0.0276 | 4.18 |
| CCBE1 | 4337 | 12969965 | A | 0.36 | 0.0222 | 3.38 |
| CDH7 | 4349 | 7241038 | T | 0.73 | 0.0152 | 3.50 |
| CDH7 | 4351 | 976882 | A | 0.73 | 0.0199 | 3.36 |
| CDH7 | 4352 | 12970791 | T | 0.73 | 0.0207 | 3.29 |
| DOK6 | 4379 | 11662555 | G | 0.27 | 0.0358 | 0.34 |
| DOK6 | 4380 | 12959721 | A | 0.27 | 0.0463 | 0.36 |
| MACROD2 | 4451 | 2193028 | C | 0.00 | 0.0466 | 0.00 |
| SEC23B | 4487 | 2273525 | T | 0.14 | 0.0389 | 5.84 |
| PTPRT | 4505 | 6065520 | T | 0.05 | 0.0104 | 0.10 |
| PTPRT | 4512 | 6072869 | G | 0.32 | 0.0418 | 3.08 |
| SNAI1 | 4524 | 6020157 | A | 0.32 | 0.0418 | 3.08 |
| SNAI1 | 4527 | 1543442 | A | 0.23 | 0.0500 | 0.34 |
| SLC37A1 | 4560 | 401396 | C | 0.45 | 0.0224 | 3.13 |
| EFCAB6 | 4601 | 4823125 | A | 0.45 | 0.0181 | 3.28 |
| EFCAB6 | 4603 | 137733 | T | 0.32 | 0.0311 | 0.34 |
| EFCAB6 | 4606 | 5764214 | C | 0.27 | 0.0358 | 0.34 |
| EFCAB6 | 4611 | 8141695 | A | 0.45 | 0.0465 | 2.69 |

TABLE A
Summary of SNPs (NCBI Human Genome Reference Assembly Build 36.3)

| Seq ID | Gene | Chr | Position (BP) | Seq ID | Gene | Chr | Position (BP) |
|---|---|---|---|---|---|---|---|
| 1 | PIK3CD | 1 | 9,713,582 | 2 | KIF1B | 1 | 10,204,773 |
| 3 | KIF1B | 1 | 10,230,040 | 4 | KIF1B | 1 | 10,271,299 |
| 5 | KIF1B | 1 | 10,308,058 | 6 | KIF1B | 1 | 10,314,123 |
| 7 | RP1-21O18.1 | 1 | 15,160,805 | 8 | RP1-21O18.1 | 1 | 15,178,638 |
| 9 | RP1-21O18.1 | 1 | 15,204,190 | 10 | RP1-21O18.1 | 1 | 15,225,545 |
| 11 | RP1-21O18.1 | 1 | 15,227,828 | 12 | RP1-21O18.1 | 1 | 15,230,092 |
| 13 | RP1-21O18.1 | 1 | 15,265,882 | 14 | RP1-21O18.1 | 1 | 15,278,076 |
| 15 | RP1-21O18.1 | 1 | 15,281,743 | 16 | RP1-21O18.1 | 1 | 15,285,942 |
| 17 | RP1-21O18.1 | 1 | 15,287,000 | 18 | RP1-21O18.1 | 1 | 15,311,577 |
| 19 | EPHB2 | 1 | 22,976,971 | 20 | EPHB2 | 1 | 22,984,956 |
| 21 | EPHB2 | 1 | 23,015,083 | 22 | EPHB2 | 1 | 23,106,187 |
| 23 | EPHB2 | 1 | 23,107,533 | 24 | AGBL4-C1ORF165 | 1 | 48,833,568 |
| 25 | AGBL4-C1ORF165 | 1 | 48,864,626 | 26 | AGBL4-C1ORF165 | 1 | 48,885,834 |
| 27 | AGBL4-C1ORF165 | 1 | 49,006,963 | 28 | AGBL4-C1ORF165 | 1 | 49,010,181 |
| 29 | AGBL4-C1ORF165 | 1 | 49,012,555 | 30 | AGBL4-C1ORF165 | 1 | 49,046,634 |
| 31 | AGBL4-C1ORF165 | 1 | 49,108,184 | 32 | AGBL4-C1ORF165 | 1 | 49,109,043 |
| 33 | AGBL4-C1ORF165 | 1 | 49,124,764 | 34 | AGBL4-C1ORF165 | 1 | 49,132,460 |
| 35 | AGBL4-C1ORF165 | 1 | 49,133,207 | 36 | AGBL4-C1ORF165 | 1 | 49,150,727 |
| 37 | AGBL4-C1ORF165 | 1 | 49,214,610 | 38 | AGBL4-C1ORF165 | 1 | 49,243,353 |
| 39 | SCP2 | 1 | 53,226,518 | 40 | SCP2 | 1 | 53,228,487 |
| 41 | SCP2 | 1 | 53,261,152 | 42 | SCP2 | 1 | 53,283,563 |
| 43 | SCP2 | 1 | 53,284,873 | 44 | SCP2 | 1 | 53,285,107 |
| 45 | SCP2 | 1 | 53,286,570 | 46 | SCP2 | 1 | 53,290,585 |
| 47 | SCP2 | 1 | 53,290,637 | 48 | LRP8 | 1 | 53,485,315 |
| 49 | LRP8 | 1 | 53,486,137 | 50 | LRP8 | 1 | 53,495,778 |
| 51 | LRP8 | 1 | 53,495,937 | 52 | LRP8 | 1 | 53,504,903 |
| 53 | LRP8 | 1 | 53,519,183 | 54 | LRP8 | 1 | 53,524,722 |
| 55 | LRP8 | 1 | 53,527,479 | 56 | LRP8 | 1 | 53,535,369 |
| 57 | LRP8 | 1 | 53,558,737 | 58 | LRP8 | 1 | 53,581,246 |
| 59 | LRP8 | 1 | 53,581,281 | 60 | LRP8 | 1 | 53,581,618 |
| 61 | ELTD1 | 1 | 79,151,010 | 62 | ELTD1 | 1 | 79,153,054 |
| 63 | ELTD1 | 1 | 79,165,344 | 64 | ELTD1 | 1 | 79,175,923 |
| 65 | ELTD1 | 1 | 79,246,223 | 66 | ELTD1 | 1 | 79,256,985 |
| 67 | ELTD1 | 1 | 79,272,148 | 68 | PRKACB | 1 | 84,299,506 |
| 69 | PRKACB | 1 | 84,301,022 | 70 | PRKACB | 1 | 84,306,260 |
| 71 | PRKACB | 1 | 84,306,347 | 72 | PRKACB | 1 | 84,323,437 |
| 73 | PRKACB | 1 | 84,334,853 | 74 | PRKACB | 1 | 84,343,593 |
| 75 | PRKACB | 1 | 84,366,987 | 76 | PRKACB | 1 | 84,435,529 |
| 77 | PRKACB | 1 | 84,450,848 | 78 | SYT6 | 1 | 114,452,599 |
| 79 | SYT6 | 1 | 114,478,552 | 80 | NGF | 1 | 115,631,509 |
| 81 | NGF | 1 | 115,658,774 | 82 | NGF | 1 | 115,664,140 |
| 83 | NGF | 1 | 115,672,877 | 84 | NGF | 1 | 115,679,147 |
| 85 | SLC22A15 | 1 | 116,329,613 | 86 | SLC22A15 | 1 | 116,353,502 |
| 87 | PTGFRN | 1 | 117,246,888 | 88 | PTGFRN | 1 | 117,267,288 |
| 89 | PTGFRN | 1 | 117,271,304 | 90 | PTGFRN | 1 | 117,272,017 |
| 91 | PTGFRN | 1 | 117,273,572 | 92 | PTGFRN | 1 | 117,277,238 |
| 93 | PTGFRN | 1 | 117,284,884 | 94 | PTGFRN | 1 | 117,316,638 |
| 95 | CGN | 1 | 149,743,817 | 96 | KCNN3 | 1 | 152,950,730 |
| 97 | KCNN3 | 1 | 152,954,821 | 98 | ATF6 | 1 | 160,027,900 |
| 99 | ATF6 | 1 | 160,052,935 | 100 | ATF6 | 1 | 160,062,017 |
| 101 | ATF6 | 1 | 160,062,520 | 102 | ATF6 | 1 | 160,101,079 |
| 103 | ATF6 | 1 | 160,102,111 | 104 | ATF6 | 1 | 160,107,168 |
| 105 | ATF6 | 1 | 160,108,831 | 106 | ATF6 | 1 | 160,118,977 |
| 107 | ATF6 | 1 | 160,143,072 | 108 | ATF6 | 1 | 160,147,921 |
| 109 | ATF6 | 1 | 160,193,261 | 110 | OLFML2B | 1 | 160,222,129 |
| 111 | OLFML2B | 1 | 160,247,126 | 112 | FAM78B | 1 | 164,309,282 |
| 113 | FAM78B | 1 | 164,314,302 | 114 | FAM78B | 1 | 164,348,193 |
| 115 | FAM78B | 1 | 164,348,737 | 116 | FAM78B | 1 | 164,350,112 |
| 117 | FAM78B | 1 | 164,364,382 | 118 | FAM78B | 1 | 164,365,940 |
| 119 | FAM78B | 1 | 164,388,390 | 120 | FAM78B | 1 | 164,392,047 |
| 121 | DPT | 1 | 166,937,301 | 122 | DPT | 1 | 166,944,971 |
| 123 | DPT | 1 | 166,954,638 | 124 | DPT | 1 | 166,961,651 |
| 125 | DPT | 1 | 166,964,218 | 126 | SEC16B | 1 | 176,201,673 |
| 127 | SEC16B | 1 | 176,201,898 | 128 | SEC16B | 1 | 176,210,214 |
| 129 | SEC16B | 1 | 176,210,435 | 130 | SEC16B | 1 | 176,215,337 |
| 131 | RALGPS2 | 1 | 176,976,589 | 132 | RALGPS2 | 1 | 177,012,234 |
| 133 | RALGPS2 | 1 | 177,114,846 | 134 | MR1 | 1 | 179,279,594 |
| 135 | PLA2G4A | 1 | 185,173,669 | 136 | PLA2G4A | 1 | 185,178,610 |
| 137 | PLA2G4A | 1 | 185,200,715 | 138 | KCNK2 | 1 | 213,266,926 |
| 139 | KCNK2 | 1 | 213,267,433 | 140 | KCNK2 | 1 | 213,269,771 |
| 141 | KCNK2 | 1 | 213,286,968 | 142 | KCNK2 | 1 | 213,302,819 |
| 143 | KCNK2 | 1 | 213,304,166 | 144 | KCNK2 | 1 | 213,312,765 |
| 145 | KCNK2 | 1 | 213,332,299 | 146 | KCNK2 | 1 | 213,336,427 |
| 147 | KCNK2 | 1 | 213,347,737 | 148 | KCNK2 | 1 | 213,393,108 |
| 149 | KCNK2 | 1 | 213,426,881 | 150 | KCNK2 | 1 | 213,474,680 |
| 151 | USH2A | 1 | 213,537,370 | 152 | USH2A | 1 | 213,895,122 |
| 153 | USH2A | 1 | 213,896,517 | 154 | USH2A | 1 | 213,911,770 |
| 155 | USH2A | 1 | 213,954,742 | 156 | USH2A | 1 | 213,955,280 |
| 157 | USH2A | 1 | 214,209,606 | 158 | USH2A | 1 | 214,404,156 |
| 159 | USH2A | 1 | 214,415,387 | 160 | USH2A | 1 | 214,429,760 |
| 161 | USH2A | 1 | 214,464,725 | 162 | USH2A | 1 | 214,466,781 |
| 163 | USH2A | 1 | 214,476,504 | 164 | USH2A | 1 | 214,498,585 |
| 165 | USH2A | 1 | 214,498,863 | 166 | USH2A | 1 | 214,498,944 |
| 167 | USH2A | 1 | 214,506,295 | 168 | USH2A | 1 | 214,506,786 |
| 169 | USH2A | 1 | 214,509,837 | 170 | USH2A | 1 | 214,572,091 |
| 171 | ESRRG | 1 | 214,773,635 | 172 | ESRRG | 1 | 214,783,160 |
| 173 | ESRRG | 1 | 214,788,713 | 174 | ESRRG | 1 | 214,788,951 |
| 175 | ESRRG | 1 | 214,789,245 | 176 | ESRRG | 1 | 214,811,868 |
| 177 | ESRRG | 1 | 214,827,730 | 178 | ESRRG | 1 | 214,836,783 |
| 179 | ESRRG | 1 | 214,886,050 | 180 | ESRRG | 1 | 214,891,848 |
| 181 | ESRRG | 1 | 214,950,266 | 182 | ESRRG | 1 | 214,951,990 |
| 183 | ESRRG | 1 | 214,952,115 | 184 | ESRRG | 1 | 214,962,423 |
| 185 | SLC35F3 | 1 | 232,371,799 | 186 | SLC35F3 | 1 | 232,375,209 |
| 187 | SLC35F3 | 1 | 232,397,501 | 188 | SLC35F3 | 1 | 232,500,781 |
| 189 | SLC35F3 | 1 | 232,515,592 | 190 | SLC35F3 | 1 | 232,524,008 |
| 191 | SLC35F3 | 1 | 232,525,097 | 192 | GNG4 | 1 | 233,780,076 |
| 193 | GNG4 | 1 | 233,794,439 | 194 | GNG4 | 1 | 233,795,519 |
| 195 | GNG4 | 1 | 233,825,193 | 196 | RYR2 | 1 | 235,343,646 |
| 197 | RYR2 | 1 | 235,413,480 | 198 | RYR2 | 1 | 235,435,907 |
| 199 | RYR2 | 1 | 235,441,114 | 200 | RYR2 | 1 | 235,500,248 |
| 201 | RYR2 | 1 | 235,513,475 | 202 | RYR2 | 1 | 235,568,481 |
| 203 | RYR2 | 1 | 235,614,223 | 204 | RYR2 | 1 | 235,616,144 |
| 205 | RYR2 | 1 | 235,661,657 | 206 | RYR2 | 1 | 235,725,107 |
| 207 | RYR2 | 1 | 235,743,969 | 208 | RYR2 | 1 | 235,793,994 |
| 209 | RYR2 | 1 | 235,844,707 | 210 | RYR2 | 1 | 235,887,079 |
| 211 | RYR2 | 1 | 235,891,567 | 212 | RYR2 | 1 | 235,942,911 |
| 213 | RYR2 | 1 | 235,964,467 | 214 | RYR2 | 1 | 235,999,612 |
| 215 | RYR2 | 1 | 236,061,906 | 216 | CHRM3 | 1 | 237,894,973 |
| 217 | CHRM3 | 1 | 237,906,730 | 218 | CHRM3 | 1 | 237,924,147 |
| 219 | CHRM3 | 1 | 237,929,034 | 220 | CHRM3 | 1 | 237,943,889 |
| 221 | CHRM3 | 1 | 237,944,344 | 222 | CHRM3 | 1 | 237,947,826 |
| 223 | CHRM3 | 1 | 237,952,433 | 224 | CHRM3 | 1 | 237,958,134 |
| 225 | CHRM3 | 1 | 237,969,464 | 226 | CHRM3 | 1 | 237,996,528 |
| 227 | CHRM3 | 1 | 238,001,974 | 228 | FMN2 | 1 | 238,340,274 |
| 229 | FMN2 | 1 | 238,349,704 | 230 | FMN2 | 1 | 238,361,987 |
| 231 | FMN2 | 1 | 238,362,705 | 232 | FMN2 | 1 | 238,386,530 |
| 233 | FMN2 | 1 | 238,407,239 | 234 | FMN2 | 1 | 238,426,833 |
| 235 | FMN2 | 1 | 238,443,154 | 236 | FMN2 | 1 | 238,455,099 |
| 237 | FMN2 | 1 | 238,486,712 | 238 | FMN2 | 1 | 238,494,888 |
| 239 | FMN2 | 1 | 238,512,719 | 240 | FMN2 | 1 | 238,516,765 |
| 241 | FMN2 | 1 | 238,519,250 | 242 | FMN2 | 1 | 238,520,251 |
| 243 | FMN2 | 1 | 238,525,003 | 244 | FMN2 | 1 | 238,559,357 |
| 245 | FMN2 | 1 | 238,559,913 | 246 | FMN2 | 1 | 238,564,221 |
| 247 | FMN2 | 1 | 238,564,870 | 248 | FMN2 | 1 | 238,669,725 |
| 249 | FMN2 | 1 | 238,670,023 | 250 | FMN2 | 1 | 238,703,639 |
| 251 | FMN2 | 1 | 238,704,194 | 252 | RGS7 | 1 | 239,024,094 |
| 253 | RGS7 | 1 | 239,026,696 | 254 | RGS7 | 1 | 239,049,800 |
| 255 | RGS7 | 1 | 239,145,433 | 256 | RGS7 | 1 | 239,198,639 |
| 257 | RGS7 | 1 | 239,202,133 | 258 | RGS7 | 1 | 239,215,583 |
| 259 | RGS7 | 1 | 239,228,398 | 260 | RGS7 | 1 | 239,576,418 |
| 261 | RGS7 | 1 | 239,588,948 | 262 | PLD5 | 1 | 240,358,903 |
| 263 | PLD5 | 1 | 240,452,068 | 264 | PLD5 | 1 | 240,454,472 |
| 265 | PLD5 | 1 | 240,454,888 | 266 | PLD5 | 1 | 240,458,406 |
| 267 | PLD5 | 1 | 240,632,975 | 268 | PLD5 | 1 | 240,640,372 |
| 269 | PLD5 | 1 | 240,643,721 | 270 | PLD5 | 1 | 240,694,244 |
| 271 | PLD5 | 1 | 240,708,546 | 272 | PLD5 | 1 | 240,723,055 |
| 273 | C2ORF46 | 2 | 8,262,682 | 274 | C2ORF46 | 2 | 8,321,006 |
| 275 | C2ORF46 | 2 | 8,342,299 | 276 | C2ORF46 | 2 | 8,354,700 |
| 277 | C2ORF46 | 2 | 8,355,126 | 278 | C2ORF46 | 2 | 8,357,838 |
| 279 | C2ORF46 | 2 | 8,383,937 | 280 | C2ORF46 | 2 | 8,384,366 |
| 281 | DDEF2 | 2 | 9,320,439 | 282 | DDEF2 | 2 | 9,458,300 |
| 283 | DDEF2 | 2 | 9,463,481 | 284 | DDEF2 | 2 | 9,464,814 |
| 285 | HPCAL1 | 2 | 10,301,740 | 286 | KCNF1 | 2 | 10,952,881 |
| 287 | KCNF1 | 2 | 10,982,079 | 288 | NTSR2 | 2 | 11,726,315 |
| 289 | KLHL29 | 2 | 23,504,556 | 290 | KLHL29 | 2 | 23,504,709 |
| 291 | KLHL29 | 2 | 23,504,805 | 292 | KLHL29 | 2 | 23,507,416 |
| 293 | KLHL29 | 2 | 23,519,201 | 294 | KLHL29 | 2 | 23,533,545 |
| 295 | KLHL29 | 2 | 23,634,723 | 296 | KLHL29 | 2 | 23,641,228 |
| 297 | KLHL29 | 2 | 23,648,425 | 298 | KLHL29 | 2 | 23,782,141 |
| 299 | KLHL29 | 2 | 23,784,540 | 300 | KLHL29 | 2 | 23,794,852 |
| 301 | KLHL29 | 2 | 23,801,093 | 302 | ASXL2 | 2 | 25,824,008 |
| 303 | ASXL2 | 2 | 25,830,860 | 304 | ASXL2 | 2 | 25,889,540 |
| 305 | ASXL2 | 2 | 25,909,377 | 306 | KCNK3 | 2 | 26,772,593 |
| 307 | KCNK3 | 2 | 26,782,315 | 308 | KCNK3 | 2 | 26,798,797 |
| 309 | KCNK3 | 2 | 26,807,044 | 310 | DPYSL5 | 2 | 6,936,993 |
| 311 | DPYSL5 | 2 | 26,991,120 | 312 | DPYSL5 | 2 | 27,023,044 |
| 313 | BRE | 2 | 28,173,537 | 314 | BRE | 2 | 28,173,685 |
| 315 | BRE | 2 | 28,178,705 | 316 | BRE | 2 | 28,179,762 |
| 317 | BRE | 2 | 28,195,657 | 318 | BRE | 2 | 28,212,255 |
| 319 | BRE | 2 | 28,212,485 | 320 | BRE | 2 | 28,243,350 |
| 321 | BRE | 2 | 28,281,970 | 322 | BRE | 2 | 28,284,035 |
| 323 | BRE | 2 | 28,285,741 | 324 | BRE | 2 | 28,357,445 |
| 325 | BRE | 2 | 28,396,438 | 326 | CRIM1 | 2 | 36,443,527 |
| 327 | CRIM1 | 2 | 36,467,658 | 328 | CRIM1 | 2 | 36,471,032 |
| 329 | CRIM1 | 2 | 36,485,964 | 330 | CRIM1 | 2 | 36,532,532 |
| 331 | CRIM1 | 2 | 36,535,123 | 332 | CRIM1 | 2 | 36,537,212 |
| 333 | CRIM1 | 2 | 36,611,604 | 334 | CRIM1 | 2 | 36,632,391 |
| 335 | FEZ2 | 2 | 36,634,284 | 336 | FEZ2 | 2 | 36,634,905 |
| 337 | FEZ2 | 2 | 36,645,798 | 338 | FEZ2 | 2 | 36,657,394 |
| 339 | FEZ2 | 2 | 36,663,000 | 340 | CDC42EP3 | 2 | 37,717,087 |
| 341 | CDC42EP3 | 2 | 37,725,643 | 342 | CDC42EP3 | 2 | 37,726,375 |
| 343 | CDC42EP3 | 2 | 37,741,421 | 344 | SLC8A1 | 2 | 40,217,148 |
| 345 | SLC8A1 | 2 | 40,230,588 | 346 | SLC8A1 | 2 | 40,253,816 |
| 347 | SLC8A1 | 2 | 40,267,644 | 348 | SLC8A1 | 2 | 40,270,423 |
| 349 | SLC8A1 | 2 | 40,279,466 | 350 | SLC8A1 | 2 | 40,414,134 |
| 351 | SLC8A1 | 2 | 40,430,629 | 352 | SLC8A1 | 2 | 40,461,774 |
| 353 | SLC8A1 | 2 | 40,492,801 | 354 | SLC8A1 | 2 | 40,494,296 |
| 355 | SLC8A1 | 2 | 40,524,198 | 356 | HAAO | 2 | 42,872,648 |
| 357 | HAAO | 2 | 42,918,059 | 358 | PLEKHH2 | 2 | 43,780,963 |
| 359 | PLEKHH2 | 2 | 43,783,487 | 360 | PLEKHH2 | 2 | 43,785,627 |
| 361 | PLEKHH2 | 2 | 43,839,444 | 362 | PLEKHH2 | 2 | 43,846,952 |
| 363 | C2ORF34 | 2 | 44,500,542 | 364 | C2ORF34 | 2 | 44,501,551 |
| 365 | C2ORF34 | 2 | 44,529,327 | 366 | C2ORF34 | 2 | 44,529,730 |
| 367 | C2ORF34 | 2 | 44,536,723 | 368 | C2ORF34 | 2 | 44,593,376 |
| 369 | C2ORF34 | 2 | 44,599,767 | 370 | C2ORF34 | 2 | 44,686,360 |
| 371 | C2ORF34 | 2 | 44,722,640 | 372 | C2ORF34 | 2 | 44,726,913 |
| 373 | C2ORF34 | 2 | 44,739,819 | 374 | C2ORF34 | 2 | 44,834,623 |
| 375 | C2ORF34 | 2 | 44,846,991 | 376 | PRKCE | 2 | 45,737,717 |
| 377 | PRKCE | 2 | 45,755,958 | 378 | PRKCE | 2 | 45,807,414 |
| 379 | PRKCE | 2 | 45,910,006 | 380 | PRKCE | 2 | 45,919,740 |
| 381 | PRKCE | 2 | 45,927,156 | 382 | PRKCE | 2 | 45,979,475 |
| 383 | PRKCE | 2 | 46,065,162 | 384 | PRKCE | 2 | 46,085,029 |
| 385 | PRKCE | 2 | 46,085,876 | 386 | PRKCE | 2 | 46,108,254 |
| 387 | PRKCE | 2 | 46,130,026 | 388 | PRKCE | 2 | 46,139,028 |
| 389 | PRKCE | 2 | 46,226,779 | 390 | PRKCE | 2 | 46,257,075 |
| 391 | EPAS1 | 2 | 46,392,298 | 392 | EPAS1 | 2 | 46,401,568 |
| 393 | EPAS1 | 2 | 46,435,886 | 394 | EPAS1 | 2 | 46,438,356 |
| 395 | EPAS1 | 2 | 46,443,888 | 396 | EPAS1 | 2 | 46,458,097 |
| 397 | EPAS1 | 2 | 46,459,163 | 398 | FBXO11 | 2 | 47,947,841 |
| 399 | FBXO11 | 2 | 47,952,212 | 400 | PSME4 | 2 | 53,909,692 |
| 401 | PSME4 | 2 | 53,957,822 | 402 | PSME4 | 2 | 53,968,471 |
| 403 | PSME4 | 2 | 53,970,304 | 404 | PSME4 | 2 | 53,978,295 |
| 405 | PSME4 | 2 | 53,988,933 | 406 | PSME4 | 2 | 54,018,352 |
| 407 | PSME4 | 2 | 54,055,952 | 408 | PSME4 | 2 | 54,064,285 |
| 409 | PSME4 | 2 | 54,136,333 | 410 | PSME4 | 2 | 54,137,945 |
| 411 | ACYP2 | 2 | 54,187,233 | 412 | ACYP2 | 2 | 54,189,467 |
| 413 | ACYP2 | 2 | 54,216,479 | 414 | ACYP2 | 2 | 54,245,303 |
| 415 | ACYP2 | 2 | 54,247,074 | 416 | ACYP2 | 2 | 54,312,954 |
| 417 | ACYP2 | 2 | 54,350,261 | 418 | CCDC85A | 2 | 56,266,849 |
| 419 | CCDC85A | 2 | 56,271,283 | 420 | CCDC85A | 2 | 56,312,732 |
| 421 | CCDC85A | 2 | 56,325,663 | 422 | CCDC85A | 2 | 56,325,994 |
| 423 | CCDC85A | 2 | 56,344,184 | 424 | CCDC85A | 2 | 56,356,533 |
| 425 | CCDC85A | 2 | 56,416,774 | 426 | CCDC85A | 2 | 56,424,062 |
| 427 | CCDC85A | 2 | 56,425,867 | 428 | CCDC85A | 2 | 56,493,023 |
| 429 | COMMD1 | 2 | 62,036,964 | 430 | COMMD1 | 2 | 62,193,184 |
| 431 | OTX1 | 2 | 63,151,654 | 432 | AAK1 | 2 | 69,546,510 |
| 433 | AAK1 | 2 | 69,569,349 | 434 | AAK1 | 2 | 69,639,692 |
| 435 | AAK1 | 2 | 69,650,512 | 436 | AAK1 | 2 | 69,673,078 |
| 437 | AAK1 | 2 | 69,708,598 | 438 | AAK1 | 2 | 69,716,927 |
| 439 | AAK1 | 2 | 69,740,261 | 440 | AAK1 | 2 | 69,768,980 |
| 441 | AAK1 | 2 | 69,834,530 | 442 | CTNNA2 | 2 | 79,613,746 |
| 443 | CTNNA2 | 2 | 79,635,253 | 444 | CTNNA2 | 2 | 79,644,485 |
| 445 | CTNNA2 | 2 | 79,648,869 | 446 | CTNNA2 | 2 | 79,827,051 |
| 447 | CTNNA2 | 2 | 79,934,690 | 448 | CTNNA2 | 2 | 79,950,787 |
| 449 | CTNNA2 | 2 | 79,998,204 | 450 | CTNNA2 | 2 | 79,998,431 |
| 451 | CTNNA2 | 2 | 80,091,949 | 452 | CTNNA2 | 2 | 80,246,403 |
| 453 | CTNNA2 | 2 | 80,252,218 | 454 | CTNNA2 | 2 | 80,302,393 |
| 455 | CTNNA2 | 2 | 80,303,744 | 456 | CTNNA2 | 2 | 80,303,795 |
| 457 | CTNNA2 | 2 | 80,305,615 | 458 | CTNNA2 | 2 | 80,305,672 |
| 459 | CTNNA2 | 2 | 80,323,975 | 460 | CTNNA2 | 2 | 80,331,785 |
| 461 | CTNNA2 | 2 | 80,341,439 | 462 | CTNNA2 | 2 | 80,341,671 |
| 463 | CTNNA2 | 2 | 80,342,285 | 464 | CTNNA2 | 2 | 80,346,411 |
| 465 | CTNNA2 | 2 | 80,348,223 | 466 | CTNNA2 | 2 | 80,368,183 |
| 467 | CTNNA2 | 2 | 80,377,795 | 468 | CTNNA2 | 2 | 80,498,999 |
| 469 | CTNNA2 | 2 | 80,598,484 | 470 | CTNNA2 | 2 | 80,657,667 |
| 471 | CTNNA2 | 2 | 80,670,274 | 472 | CTNNA2 | 2 | 80,682,874 |
| 473 | CTNNA2 | 2 | 80,703,322 | 474 | INPP4A | 2 | 98,449,370 |
| 475 | INPP4A | 2 | 98,538,676 | 476 | NAP5 | 2 | 133,368,245 |
| 477 | NAP5 | 2 | 133,513,639 | 478 | NAP5 | 2 | 133,547,260 |
| 479 | NAP5 | 2 | 133,558,451 | 480 | NAP5 | 2 | 133,567,502 |
| 481 | NAP5 | 2 | 133,613,763 | 482 | NAP5 | 2 | 133,619,788 |
| 483 | NAP5 | 2 | 133,620,453 | 484 | NAP5 | 2 | 133,628,562 |
| 485 | NAP5 | 2 | 133,692,413 | 486 | NAP5 | 2 | 133,970,443 |
| 487 | NAP5 | 2 | 134,029,768 | 488 | RAB3GAP1 | 2 | 135,514,217 |
| 489 | RAB3GAP1 | 2 | 135,649,190 | 490 | ZRANB3 | 2 | 135,701,191 |
| 491 | ZRANB3 | 2 | 135,867,882 | 492 | ZRANB3 | 2 | 135,868,244 |
| 493 | ZRANB3 | 2 | 135,903,815 | 494 | ZRANB3 | 2 | 135,981,101 |
| 495 | ZRANB3 | 2 | 136,029,379 | 496 | UBXD2 | 2 | 136,223,397 |
| 497 | UBXD2 | 2 | 136,262,314 | 498 | NXPH2 | 2 | 139,205,858 |
| 499 | NXPH2 | 2 | 139,218,623 | 500 | NXPH2 | 2 | 139,301,576 |
| 501 | LRP1B | 2 | 140,708,533 | 502 | LRP1B | 2 | 140,710,220 |
| 503 | LRP1B | 2 | 140,711,565 | 504 | LRP1B | 2 | 140,740,113 |
| 505 | LRP1B | 2 | 140,749,675 | 506 | LRP1B | 2 | 140,836,079 |
| 507 | LRP1B | 2 | 140,917,629 | 508 | LRP1B | 2 | 141,253,166 |
| 509 | LRP1B | 2 | 141,446,369 | 510 | LRP1B | 2 | 141,470,624 |
| 511 | LRP1B | 2 | 141,472,804 | 512 | LRP1B | 2 | 141,702,891 |
| 513 | LRP1B | 2 | 141,715,030 | 514 | LRP1B | 2 | 141,896,198 |
| 515 | LRP1B | 2 | 142,007,651 | 516 | LRP1B | 2 | 142,065,965 |
| 517 | LRP1B | 2 | 142,066,600 | 518 | LRP1B | 2 | 142,371,205 |
| 519 | LRP1B | 2 | 142,371,483 | 520 | LRP1B | 2 | 142,395,682 |
| 521 | LRP1B | 2 | 142,529,079 | 522 | LRP1B | 2 | 142,573,134 |
| 523 | LRP1B | 2 | 142,591,970 | 524 | LRP1B | 2 | 142,598,638 |
| 525 | KYNU | 2 | 143,355,132 | 526 | KYNU | 2 | 143,368,826 |
| 527 | KYNU | 2 | 143,405,309 | 528 | KYNU | 2 | 143,430,832 |
| 529 | KYNU | 2 | 143,434,516 | 530 | KYNU | 2 | 143,439,309 |
| 531 | KYNU | 2 | 143,455,211 | 532 | KYNU | 2 | 143,465,263 |
| 533 | KYNU | 2 | 143,504,218 | 534 | KYNU | 2 | 143,513,164 |
| 535 | KYNU | 2 | 143,516,377 | 536 | KYNU | 2 | 143,598,044 |
| 537 | ARHGAP15 | 2 | 143,606,219 | 538 | ARHGAP15 | 2 | 143,685,981 |
| 539 | ARHGAP15 | 2 | 143,692,950 | 540 | ARHGAP15 | 2 | 143,698,840 |
| 541 | ARHGAP15 | 2 | 143,729,953 | 542 | ARHGAP15 | 2 | 143,729,996 |
| 543 | ARHGAP15 | 2 | 143,738,248 | 544 | ARHGAP15 | 2 | 143,739,424 |
| 545 | ARHGAP15 | 2 | 143,757,220 | 546 | ARHGAP15 | 2 | 143,769,771 |
| 547 | ARHGAP15 | 2 | 143,848,173 | 548 | ARHGAP15 | 2 | 143,849,979 |
| 549 | ARHGAP15 | 2 | 143,943,051 | 550 | ARHGAP15 | 2 | 143,999,263 |
| 551 | ARHGAP15 | 2 | 144,018,166 | 552 | ARHGAP15 | 2 | 144,025,496 |
| 553 | ARHGAP15 | 2 | 144,034,639 | 554 | ARHGAP15 | 2 | 144,040,124 |
| 555 | ARHGAP15 | 2 | 144,064,434 | 556 | ARHGAP15 | 2 | 144,068,893 |
| 557 | ARHGAP15 | 2 | 144,097,012 | 558 | ARHGAP15 | 2 | 144,273,491 |
| 559 | ARHGAP15 | 2 | 144,283,468 | 560 | ARHGAP15 | 2 | 144,294,622 |
| 561 | ARHGAP15 | 2 | 144,295,364 | 562 | KIF5C | 2 | 149,333,649 |
| 563 | KIF5C | 2 | 149,521,137 | 564 | KIF5C | 2 | 149,539,190 |
| 565 | CACNB4 | 2 | 152,527,508 | 566 | CACNB4 | 2 | 152,578,170 |
| 567 | CACNB4 | 2 | 152,587,594 | 568 | CACNB4 | 2 | 152,607,303 |
| 569 | CACNB4 | 2 | 152,632,727 | 570 | CACNB4 | 2 | 152,638,370 |
| 571 | CACNB4 | 2 | 152,655,949 | 572 | CACNB4 | 2 | 152,659,379 |
| 573 | CACNB4 | 2 | 152,684,248 | 574 | FMNL2 | 2 | 152,981,465 |
| 575 | FMNL2 | 2 | 152,996,148 | 576 | FMNL2 | 2 | 153,007,734 |
| 577 | FMNL2 | 2 | 153,075,073 | 578 | FMNL2 | 2 | 153,096,733 |
| 579 | FMNL2 | 2 | 153,097,194 | 580 | FMNL2 | 2 | 153,102,193 |
| 581 | FMNL2 | 2 | 153,146,684 | 582 | FMNL2 | 2 | 153,146,906 |
| 583 | FMNL2 | 2 | 153,147,303 | 584 | FMNL2 | 2 | 153,147,664 |
| 585 | FMNL2 | 2 | 153,159,182 | 586 | FMNL2 | 2 | 153,166,996 |
| 587 | FMNL2 | 2 | 153,201,156 | 588 | FMNL2 | 2 | 153,201,532 |
| 589 | FMNL2 | 2 | 153,207,856 | 590 | KCNJ3 | 2 | 155,289,884 |
| 591 | KCNJ3 | 2 | 155,329,292 | 592 | KCNJ3 | 2 | 155,397,929 |
| 593 | KCNJ3 | 2 | 155,403,085 | 594 | PKP4 | 2 | 159,035,950 |
| 595 | PKP4 | 2 | 159,058,381 | 596 | PKP4 | 2 | 159,099,329 |
| 597 | PKP4 | 2 | 159,132,118 | 598 | PKP4 | 2 | 159,175,274 |
| 599 | PKP4 | 2 | 159,214,299 | 600 | PKP4 | 2 | 159,219,409 |
| 601 | PKP4 | 2 | 159,240,155 | 602 | PLA2R1 | 2 | 160,516,321 |
| 603 | PLA2R1 | 2 | 160,516,560 | 604 | PLA2R1 | 2 | 160,519,430 |
| 605 | PLA2R1 | 2 | 160,543,237 | 606 | PLA2R1 | 2 | 160,543,645 |
| 607 | PLA2R1 | 2 | 160,550,074 | 608 | PLA2R1 | 2 | 160,575,305 |
| 609 | PLA2R1 | 2 | 160,575,799 | 610 | PLA2R1 | 2 | 160,584,453 |
| 611 | PLA2R1 | 2 | 160,599,255 | 612 | PLA2R1 | 2 | 160,612,267 |
| 613 | PLA2R1 | 2 | 160,616,115 | 614 | PLA2R1 | 2 | 160,623,352 |
| 615 | SCN3A | 2 | 165,671,518 | 616 | SCN3A | 2 | 165,685,811 |
| 617 | SCN3A | 2 | 165,708,114 | 618 | SCN3A | 2 | 165,732,374 |
| 619 | SCN1A | 2 | 166,596,685 | 620 | SCN1A | 2 | 166,606,110 |
| 621 | SCN1A | 2 | 166,617,790 | 622 | SCN1A | 2 | 166,632,718 |
| 623 | SCN9A | 2 | 166,764,674 | 624 | SCN9A | 2 | 166,781,097 |
| 625 | SCN9A | 2 | 166,807,404 | 626 | SCN9A | 2 | 166,817,960 |
| 627 | SCN9A | 2 | 166,857,449 | 628 | SCN9A | 2 | 166,871,909 |
| 629 | SCN9A | 2 | 166,874,107 | 630 | SCN7A | 2 | 166,970,599 |
| 631 | CERKL | 2 | 182,130,703 | 632 | CERKL | 2 | 182,145,339 |
| 633 | CERKL | 2 | 182,164,093 | 634 | CERKL | 2 | 182,228,354 |
| 635 | CERKL | 2 | 182,239,099 | 636 | PDE1A | 2 | 182,767,445 |
| 637 | PDE1A | 2 | 182,821,396 | 638 | PDE1A | 2 | 182,826,618 |
| 639 | PDE1A | 2 | 182,840,603 | 640 | PDE1A | 2 | 182,886,451 |
| 641 | PDE1A | 2 | 182,918,516 | 642 | PDE1A | 2 | 182,932,372 |
| 643 | PDE1A | 2 | 182,971,998 | 644 | PDE1A | 2 | 183,013,022 |
| 645 | PDE1A | 2 | 183,013,344 | 646 | PDE1A | 2 | 183,050,970 |
| 647 | PDE1A | 2 | 183,061,827 | 648 | PDE1A | 2 | 183,067,065 |
| 649 | PDE1A | 2 | 183,086,558 | 650 | PDE1A | 2 | 183,088,998 |
| 651 | ALS2 | 2 | 202,278,237 | 652 | ALS2 | 2 | 202,288,513 |
| 653 | ALS2 | 2 | 202,305,680 | 654 | ALS2 | 2 | 202,341,183 |
| 655 | PARD3B | 2 | 205,237,235 | 656 | PARD3B | 2 | 205,244,163 |
| 657 | PARD3B | 2 | 205,347,353 | 658 | PARD3B | 2 | 205,620,648 |
| 659 | PARD3B | 2 | 205,625,989 | 660 | PARD3B | 2 | 205,639,010 |
| 661 | PARD3B | 2 | 205,650,805 | 662 | PARD3B | 2 | 205,659,848 |
| 663 | PARD3B | 2 | 205,705,702 | 664 | PARD3B | 2 | 205,725,077 |
| 665 | PARD3B | 2 | 205,907,031 | 666 | PARD3B | 2 | 205,967,382 |
| 667 | PARD3B | 2 | 206,172,710 | 668 | NRP2 | 2 | 206,294,712 |
| 669 | NRP2 | 2 | 206,296,221 | 670 | NRP2 | 2 | 206,300,940 |
| 671 | NRP2 | 2 | 206,301,486 | 672 | NRP2 | 2 | 206,318,296 |
| 673 | NRP2 | 2 | 206,441,948 | 674 | NRP2 | 2 | 206,442,661 |
| 675 | NRP2 | 2 | 206,443,765 | 676 | PIP5K3 | 2 | 208,955,629 |
| 677 | PIP5K3 | 2 | 208,956,492 | 678 | ERBB4 | 2 | 211,975,964 |
| 679 | ERBB4 | 2 | 211,983,182 | 680 | ERBB4 | 2 | 212,022,377 |
| 681 | ERBB4 | 2 | 213,497,122 | 682 | ERBB4 | 2 | 213,505,758 |
| 683 | ERBB4 | 2 | 213,507,896 | 684 | ERBB4 | 2 | 213,508,611 |
| 685 | CUL3 | 2 | 225,109,321 | 686 | CUL3 | 2 | 225,148,088 |
| 687 | CUL3 | 2 | 225,149,052 | 688 | IRS1 | 2 | 227,304,756 |
| 689 | IRS1 | 2 | 227,307,777 | 690 | IRS1 | 2 | 227,322,249 |
| 691 | IRS1 | 2 | 227,362,192 | 692 | COL4A4 | 2 | 227,583,201 |
| 693 | COL4A4 | 2 | 227,591,892 | 694 | COL4A4 | 2 | 227,606,678 |
| 695 | COL4A4 | 2 | 227,608,663 | 696 | COL4A4 | 2 | 227,622,869 |
| 697 | COL4A4 | 2 | 227,630,259 | 698 | COL4A3 | 2 | 227,768,751 |
| 699 | COL4A3 | 2 | 227,795,487 | 700 | COL4A3 | 2 | 227,795,722 |
| 701 | COL4A3 | 2 | 227,800,650 | 702 | COL4A3 | 2 | 227,801,143 |
| 703 | COL4A3 | 2 | 227,818,028 | 704 | COL4A3 | 2 | 227,848,813 |
| 705 | COL4A3 | 2 | 227,864,848 | 706 | COL4A3 | 2 | 227,875,258 |
| 707 | COL4A3 | 2 | 227,885,145 | 708 | COL4A3 | 2 | 227,885,723 |
| 709 | COL4A3 | 2 | 227,886,069 | 710 | COL4A3 | 2 | 227,889,666 |
| 711 | DNER | 2 | 229,942,770 | 712 | DNER | 2 | 229,964,830 |
| 713 | DNER | 2 | 229,972,935 | 714 | DNER | 2 | 230,110,447 |
| 715 | DNER | 2 | 230,162,171 | 716 | DNER | 2 | 230,170,094 |
| 717 | DNER | 2 | 230,176,862 | 718 | DNER | 2 | 230,262,864 |
| 719 | DNER | 2 | 230,270,658 | 720 | DNER | 2 | 230,270,700 |
| 721 | DNER | 2 | 230,271,362 | 722 | DNER | 2 | 230,271,569 |
| 723 | TRIP12 | 2 | 230,296,640 | 724 | TRIP12 | 2 | 230,317,393 |
| 725 | TRIP12 | 2 | 230,340,512 | 726 | TRIP12 | 2 | 230,422,269 |
| 727 | TRIP12 | 2 | 230,442,325 | 728 | TRIP12 | 2 | 230,447,453 |
| 729 | ECEL1 | 2 | 233,048,959 | 730 | CHRND | 2 | 233,091,660 |
| 731 | SAG | 2 | 233,903,639 | 732 | SAG | 2 | 233,909,134 |
| 733 | CNTN6 | 3 | 1,222,723 | 734 | CNTN6 | 3 | 1,231,380 |
| 735 | CNTN6 | 3 | 1,247,244 | 736 | CNTN6 | 3 | 1,251,092 |
| 737 | CNTN6 | 3 | 1,268,504 | 738 | CNTN6 | 3 | 1,292,727 |
| 739 | CNTN6 | 3 | 1,295,271 | 740 | CNTN6 | 3 | 1,311,397 |
| 741 | CNTN6 | 3 | 1,313,259 | 742 | CNTN6 | 3 | 1,336,323 |
| 743 | CNTN6 | 3 | 1,341,846 | 744 | CNTN6 | 3 | 1,350,581 |
| 745 | CNTN6 | 3 | 1,357,151 | 746 | CNTN6 | 3 | 1,357,358 |
| 747 | CNTN6 | 3 | 1,372,414 | 748 | CNTN6 | 3 | 1,375,419 |
| 749 | CNTN6 | 3 | 1,378,076 | 750 | CNTN6 | 3 | 1,396,673 |
| 751 | CNTN6 | 3 | 1,399,850 | 752 | CNTN6 | 3 | 1,400,997 |
| 753 | CNTN6 | 3 | 1,403,635 | 754 | CNTN6 | 3 | 1,414,974 |
| 755 | CNTN4 | 3 | 2,072,897 | 756 | CNTN4 | 3 | 2,267,019 |
| 757 | CNTN4 | 3 | 2,285,875 | 758 | CNTN4 | 3 | 2,287,398 |
| 759 | CNTN4 | 3 | 2,287,451 | 760 | CNTN4 | 3 | 2,298,242 |
| 761 | CNTN4 | 3 | 2,321,860 | 762 | CNTN4 | 3 | 2,326,831 |
| 763 | CNTN4 | 3 | 2,336,802 | 764 | CNTN4 | 3 | 2,375,967 |
| 765 | CNTN4 | 3 | 2,384,532 | 766 | CNTN4 | 3 | 2,386,061 |
| 767 | CNTN4 | 3 | 2,734,283 | 768 | CNTN4 | 3 | 2,736,667 |
| 769 | CNTN4 | 3 | 2,758,344 | 770 | CNTN4 | 3 | 3,046,742 |
| 771 | CNTN4 | 3 | 3,047,912 | 772 | CNTN4 | 3 | 3,048,509 |
| 773 | CNTN4 | 3 | 3,067,546 | 774 | ITPR1 | 3 | 4,511,386 |
| 775 | ITPR1 | 3 | 4,527,175 | 776 | ITPR1 | 3 | 4,688,162 |
| 777 | ITPR1 | 3 | 4,720,230 | 778 | ITPR1 | 3 | 4,725,489 |
| 779 | ITPR1 | 3 | 4,725,558 | 780 | ITPR1 | 3 | 4,725,674 |
| 781 | ITPR1 | 3 | 4,729,125 | 782 | ITPR1 | 3 | 4,841,416 |
| 783 | ITPR1 | 3 | 4,846,598 | 784 | IRAK2 | 3 | 10,234,114 |
| 785 | IRAK2 | 3 | 10,251,163 | 786 | IRAK2 | 3 | 10,252,129 |
| 787 | ATP2B2 | 3 | 10,358,996 | 788 | ATP2B2 | 3 | 10,412,280 |
| 789 | ATP2B2 | 3 | 10,416,147 | 790 | ATP2B2 | 3 | 10,418,090 |
| 791 | ATP2B2 | 3 | 10,432,572 | 792 | ATP2B2 | 3 | 10,432,857 |
| 793 | ATP2B2 | 3 | 10,439,753 | 794 | SLC6A6 | 3 | 14,421,894 |
| 795 | SLC6A6 | 3 | 14,422,977 | 796 | SLC6A6 | 3 | 14,464,931 |
| 797 | SLC6A6 | 3 | 14,495,168 | 798 | SLC6A6 | 3 | 14,503,422 |
| 799 | DAZL | 3 | 16,599,020 | 800 | DAZL | 3 | 16,602,617 |
| 801 | DAZL | 3 | 16,611,406 | 802 | DAZL | 3 | 16,611,469 |
| 803 | DAZL | 3 | 16,627,901 | 804 | RARB | 3 | 25,506,269 |
| 805 | RARB | 3 | 25,544,885 | 806 | RARB | 3 | 25,589,536 |
| 807 | RARB | 3 | 25,592,407 | 808 | RARB | 3 | 25,593,163 |
| 809 | RARB | 3 | 25,620,267 | 810 | RARB | 3 | 25,620,425 |
| 811 | FBXL2 | 3 | 33,317,991 | 812 | FBXL2 | 3 | 33,400,034 |
| 813 | CLASP2 | 3 | 33,516,308 | 814 | CLASP2 | 3 | 33,516,362 |
| 815 | CLASP2 | 3 | 33,592,794 | 816 | CLASP2 | 3 | 33,752,897 |
| 817 | CLASP2 | 3 | 33,761,745 | 818 | CLASP2 | 3 | 33,780,565 |
| 819 | ARPP-21 | 3 | 35,697,969 | 820 | ARPP-21 | 3 | 35,742,792 |
| 821 | ARPP-21 | 3 | 35,750,253 | 822 | ARPP-21 | 3 | 35,760,612 |
| 823 | STAC | 3 | 36,432,376 | 824 | STAC | 3 | 36,433,107 |
| 825 | STAC | 3 | 36,445,311 | 826 | STAC | 3 | 36,459,827 |
| 827 | ULK4 | 3 | 41,283,352 | 828 | ULK4 | 3 | 41,329,536 |
| 829 | ULK4 | 3 | 41,344,053 | 830 | ULK4 | 3 | 41,348,228 |
| 831 | ULK4 | 3 | 41,350,671 | 832 | ULK4 | 3 | 41,363,412 |
| 833 | ULK4 | 3 | 41,365,143 | 834 | ULK4 | 3 | 41,369,174 |
| 835 | ULK4 | 3 | 41,395,796 | 836 | ULK4 | 3 | 41,421,630 |
| 837 | ULK4 | 3 | 41,438,204 | 838 | ULK4 | 3 | 41,455,051 |
| 839 | ULK4 | 3 | 41,468,595 | 840 | ULK4 | 3 | 41,469,435 |
| 841 | ULK4 | 3 | 41,469,609 | 842 | ULK4 | 3 | 41,476,741 |
| 843 | ULK4 | 3 | 41,482,456 | 844 | ULK4 | 3 | 41,507,368 |
| 845 | ULK4 | 3 | 41,507,554 | 846 | ULK4 | 3 | 41,508,106 |
| 847 | ULK4 | 3 | 41,584,470 | 848 | ULK4 | 3 | 41,736,832 |
| 849 | ULK4 | 3 | 41,785,368 | 850 | ULK4 | 3 | 41,833,735 |
| 851 | ULK4 | 3 | 41,852,418 | 852 | ULK4 | 3 | 41,900,305 |
| 853 | ULK4 | 3 | 41,971,140 | 854 | ZNF445 | 3 | 44,542,069 |
| 855 | GPX1 | 3 | 49,429,116 | 856 | GPX1 | 3 | 49,545,204 |
| 857 | GPX1 | 3 | 49,624,993 | 858 | GPX1 | 3 | 49,853,117 |
| 859 | GPX1 | 3 | 49,865,617 | 860 | SEMA3F | 3 | 50,180,966 |
| 861 | CACNA2D2 | 3 | 50,406,198 | 862 | CACNA2D2 | 3 | 50,451,382 |
| 863 | CACNA2D2 | 3 | 50,523,899 | 864 | CACNA2D3 | 3 | 54,127,859 |
| 865 | CACNA2D3 | 3 | 54,216,922 | 866 | CACNA2D3 | 3 | 54,217,081 |
| 867 | CACNA2D3 | 3 | 54,331,793 | 868 | CACNA2D3 | 3 | 54,494,308 |
| 869 | CACNA2D3 | 3 | 54,540,948 | 870 | CACNA2D3 | 3 | 54,774,489 |
| 871 | CACNA2D3 | 3 | 54,918,069 | 872 | CACNA2D3 | 3 | 54,953,081 |
| 873 | CACNA2D3 | 3 | 54,955,060 | 874 | CACNA2D3 | 3 | 54,996,262 |
| 875 | CACNA2D3 | 3 | 55,019,916 | 876 | CACNA2D3 | 3 | 55,094,024 |
| 877 | ERC2 | 3 | 55,519,913 | 878 | ERC2 | 3 | 55,743,028 |
| 879 | ERC2 | 3 | 55,757,809 | 880 | ERC2 | 3 | 55,760,546 |
| 881 | ERC2 | 3 | 55,858,272 | 882 | ERC2 | 3 | 55,877,492 |
| 883 | ERC2 | 3 | 55,902,605 | 884 | ERC2 | 3 | 55,954,550 |
| 885 | ERC2 | 3 | 55,985,742 | 886 | ERC2 | 3 | 56,002,843 |
| 887 | ERC2 | 3 | 56,119,301 | 888 | ERC2 | 3 | 56,164,173 |
| 889 | ERC2 | 3 | 56,175,003 | 890 | ERC2 | 3 | 56,245,378 |
| 891 | ERC2 | 3 | 56,304,151 | 892 | ERC2 | 3 | 56,337,250 |
| 893 | ERC2 | 3 | 56,347,766 | 894 | ERC2 | 3 | 56,368,109 |
| 895 | ERC2 | 3 | 56,393,831 | 896 | ERC2 | 3 | 56,422,909 |
| 897 | ERC2 | 3 | 56,462,620 | 898 | ERC2 | 3 | 56,464,816 |
| 899 | ERC2 | 3 | 56,491,685 | 900 | ERC2 | 3 | 56,496,204 |
| 901 | ERC2 | 3 | 56,496,259 | 902 | ERC2 | 3 | 56,510,277 |
| 903 | IL17RD | 3 | 57,115,148 | 904 | IL17RD | 3 | 57,128,722 |
| 905 | IL17RD | 3 | 57,128,909 | 906 | IL17RD | 3 | 57,143,381 |
| 907 | FLNB | 3 | 58,057,749 | 908 | FLNB | 3 | 58,069,197 |
| 909 | FLNB | 3 | 58,075,809 | 910 | FLNB | 3 | 58,083,555 |
| 911 | FLNB | 3 | 58,093,595 | 912 | FLNB | 3 | 58,139,576 |
| 913 | FLNB | 3 | 58,143,446 | 914 | FHIT | 3 | 59,824,587 |
| 915 | FHIT | 3 | 59,949,555 | 916 | FHIT | 3 | 59,956,565 |
| 917 | FHIT | 3 | 59,966,929 | 918 | FHIT | 3 | 60,339,716 |
| 919 | FHIT | 3 | 60,367,407 | 920 | FHIT | 3 | 60,478,148 |
| 921 | FHIT | 3 | 61,027,539 | 922 | FHIT | 3 | 61,027,560 |
| 923 | FHIT | 3 | 61,027,682 | 924 | FHIT | 3 | 61,135,266 |
| 925 | FHIT | 3 | 61,137,444 | 926 | FHIT | 3 | 61,159,361 |
| 927 | FHIT | 3 | 61,213,258 | 928 | FHIT | 3 | 61,214,250 |
| 929 | FHIT | 3 | 61,228,928 | 930 | FHIT | 3 | 61,234,576 |
| 931 | PTPRG | 3 | 61,484,177 | 932 | PTPRG | 3 | 61,488,535 |
| 933 | PTPRG | 3 | 61,493,156 | 934 | PTPRG | 3 | 61,723,402 |
| 935 | PTPRG | 3 | 62,142,228 | 936 | PTPRG | 3 | 62,196,081 |
| 937 | PTPRG | 3 | 62,219,484 | 938 | PTPRG | 3 | 62,219,610 |
| 939 | PTPRG | 3 | 62,221,462 | 940 | PTPRG | 3 | 62,245,596 |
| 941 | PTPRG | 3 | 62,256,476 | 942 | CADPS | 3 | 62,473,418 |
| 943 | CADPS | 3 | 62,487,886 | 944 | CADPS | 3 | 62,498,262 |
| 945 | CADPS | 3 | 62,548,478 | 946 | CADPS | 3 | 62,720,200 |
| 947 | CADPS | 3 | 62,748,989 | 948 | CADPS | 3 | 62,789,812 |
| 949 | CADPS | 3 | 62,801,974 | 950 | CADPS | 3 | 62,836,232 |
| 951 | CADPS | 3 | 62,846,542 | 952 | CADPS | 3 | 62,855,968 |
| 953 | SYNPR | 3 | 63,451,187 | 954 | SYNPR | 3 | 63,493,882 |
| 955 | SYNPR | 3 | 63,500,043 | 956 | SYNPR | 3 | 63,531,349 |
| 957 | PRICKLE2 | 3 | 64,058,457 | 958 | PRICKLE2 | 3 | 64,091,416 |
| 959 | PRICKLE2 | 3 | 64,123,328 | 960 | PRICKLE2 | 3 | 64,136,626 |
| 961 | PRICKLE2 | 3 | 64,140,665 | 962 | PRICKLE2 | 3 | 64,153,423 |
| 963 | PRICKLE2 | 3 | 64,153,968 | 964 | PRICKLE2 | 3 | 64,159,437 |
| 965 | PRICKLE2 | 3 | 64,160,166 | 966 | PRICKLE2 | 3 | 64,176,516 |
| 967 | PRICKLE2 | 3 | 64,178,866 | 968 | PRICKLE2 | 3 | 64,181,567 |
| 969 | PRICKLE2 | 3 | 64,184,717 | 970 | PRICKLE2 | 3 | 64,186,645 |
| 971 | MAGI1 | 3 | 65,373,938 | 972 | MAGI1 | 3 | 65,407,523 |
| 973 | MAGI1 | 3 | 65,496,864 | 974 | MAGI1 | 3 | 65,505,289 |
| 975 | MAGI1 | 3 | 65,576,735 | 976 | MAGI1 | 3 | 65,839,896 |
| 977 | MAGI1 | 3 | 65,968,144 | 978 | MAGI1 | 3 | 65,975,330 |
| 979 | FAM19A1 | 3 | 68,196,007 | 980 | FAM19A1 | 3 | 68,232,575 |
| 981 | FAM19A1 | 3 | 68,409,920 | 982 | FAM19A1 | 3 | 68,614,345 |
| 983 | FAM19A1 | 3 | 68,673,127 | 984 | FOXP1 | 3 | 70,972,978 |
| 985 | FOXP1 | 3 | 71,021,299 | 986 | FOXP1 | 3 | 71,295,488 |
| 987 | FOXP1 | 3 | 71,476,030 | 988 | GBE1 | 3 | 81,687,469 |
| 989 | GBE1 | 3 | 81,694,225 | 990 | GBE1 | 3 | 81,702,278 |
| 991 | GBE1 | 3 | 81,727,601 | 992 | GBE1 | 3 | 81,816,787 |
| 993 | GBE1 | 3 | 81,841,418 | 994 | GBE1 | 3 | 81,848,716 |
| 995 | GBE1 | 3 | 81,859,450 | 996 | GBE1 | 3 | 81,885,108 |
| 997 | GBE1 | 3 | 81,893,914 | 998 | GBE1 | 3 | 81,894,474 |
| 999 | HTR1F | 3 | 88,105,976 | 1000 | STX19 | 3 | 95,301,818 |
| 1001 | EPHA6 | 3 | 97,947,064 | 1002 | EPHA6 | 3 | 97,998,729 |
| 1003 | EPHA6 | 3 | 98,070,623 | 1004 | EPHA6 | 3 | 98,108,626 |
| 1005 | EPHA6 | 3 | 98,164,249 | 1006 | EPHA6 | 3 | 98,267,154 |
| 1007 | EPHA6 | 3 | 98,686,182 | 1008 | EPHA6 | 3 | 98,787,645 |
| 1009 | EPHA6 | 3 | 98,810,974 | 1010 | PLCXD2 | 3 | 112,883,336 |
| 1011 | PLCXD2 | 3 | 112,941,527 | 1012 | PLCXD2 | 3 | 112,949,845 |
| 1013 | PLCXD2 | 3 | 112,953,907 | 1014 | PLCXD2 | 3 | 112,960,464 |
| 1015 | PLCXD2 | 3 | 112,964,847 | 1016 | PLCXD2 | 3 | 113,021,589 |
| 1017 | PLCXD2 | 3 | 113,072,668 | 1018 | CDGAP | 3 | 120,517,200 |
| 1019 | CDGAP | 3 | 120,525,701 | 1020 | CDGAP | 3 | 120,527,813 |
| 1021 | CDGAP | 3 | 120,551,002 | 1022 | CDGAP | 3 | 120,606,504 |
| 1023 | CDGAP | 3 | 120,612,831 | 1024 | CDGAP | 3 | 120,615,873 |
| 1025 | CDGAP | 3 | 120,621,365 | 1026 | STXBP5L | 3 | 122,127,643 |
| 1027 | STXBP5L | 3 | 122,140,467 | 1028 | STXBP5L | 3 | 122,173,450 |
| 1029 | STXBP5L | 3 | 122,346,648 | 1030 | STXBP5L | 3 | 122,406,894 |
| 1031 | STXBP5L | 3 | 122,476,483 | 1032 | STXBP5L | 3 | 122,522,839 |
| 1033 | STXBP5L | 3 | 122,608,097 | 1034 | STXBP5L | 3 | 122,623,726 |
| 1035 | STXBP5L | 3 | 122,626,569 | 1036 | STXBP5L | 3 | 122,628,751 |
| 1037 | KALRN | 3 | 125,461,439 | 1038 | KALRN | 3 | 125,461,555 |
| 1039 | KALRN | 3 | 125,462,341 | 1040 | KALRN | 3 | 125,586,787 |
| 1041 | KALRN | 3 | 125,602,730 | 1042 | KALRN | 3 | 125,610,651 |
| 1043 | KALRN | 3 | 125,632,871 | 1044 | KALRN | 3 | 125,876,300 |
| 1045 | KALRN | 3 | 125,928,454 | 1046 | KALRN | 3 | 125,928,594 |
| 1047 | ZXDC | 3 | 127,665,610 | 1048 | CPNE4 | 3 | 132,725,192 |
| 1049 | CPNE4 | 3 | 132,741,385 | 1050 | CPNE4 | 3 | 132,749,292 |
| 1051 | CPNE4 | 3 | 132,772,981 | 1052 | CPNE4 | 3 | 132,802,779 |
| 1053 | CPNE4 | 3 | 132,865,495 | 1054 | CPNE4 | 3 | 132,885,425 |
| 1055 | CPNE4 | 3 | 132,886,287 | 1056 | CPNE4 | 3 | 132,907,690 |
| 1057 | CPNE4 | 3 | 132,918,068 | 1058 | CPNE4 | 3 | 133,145,979 |
| 1059 | CPNE4 | 3 | 133,235,987 | 1060 | CPNE4 | 3 | 133,241,957 |
| 1061 | RAB6B | 3 | 135,041,388 | 1062 | RAB6B | 3 | 135,064,149 |
| 1063 | EPHB1 | 3 | 136,138,136 | 1064 | EPHB1 | 3 | 136,151,931 |
| 1065 | EPHB1 | 3 | 136,154,975 | 1066 | EPHB1 | 3 | 136,156,084 |
| 1067 | EPHB1 | 3 | 136,165,323 | 1068 | EPHB1 | 3 | 136,172,644 |
| 1069 | EPHB1 | 3 | 136,306,915 | 1070 | EPHB1 | 3 | 136,390,869 |
| 1071 | EPHB1 | 3 | 136,505,913 | 1072 | EPHB1 | 3 | 136,509,166 |
| 1073 | CLSTN2 | 3 | 141,659,332 | 1074 | CLSTN2 | 3 | 141,661,175 |
| 1075 | CLSTN2 | 3 | 141,662,920 | 1076 | CLSTN2 | 3 | 141,663,200 |
| 1077 | CLSTN2 | 3 | 141,764,774 | 1078 | CLSTN2 | 3 | 141,770,820 |
| 1079 | CLSTN2 | 3 | 141,773,663 | 1080 | CLSTN2 | 3 | 141,774,103 |
| 1081 | CLSTN2 | 3 | 141,775,226 | 1082 | SPSB4 | 3 | 142,241,400 |
| 1083 | SPSB4 | 3 | 142,258,988 | 1084 | SPSB4 | 3 | 142,286,988 |
| 1085 | SPSB4 | 3 | 142,287,637 | 1086 | SPSB4 | 3 | 142,328,274 |
| 1087 | SERPINI2 | 3 | 168,658,115 | 1088 | SERPINI2 | 3 | 168,667,572 |
| 1089 | SERPINI2 | 3 | 168,672,301 | 1090 | SERPINI2 | 3 | 168,681,607 |
| 1091 | SERPINI1 | 3 | 168,954,239 | 1092 | SERPINI1 | 3 | 168,985,871 |
| 1093 | SLC7A14 | 3 | 171,682,206 | 1094 | SLC7A14 | 3 | 171,736,501 |
| 1095 | SLC7A14 | 3 | 171,743,763 | 1096 | SLC7A14 | 3 | 171,815,650 |
| 1097 | TNIK | 3 | 172,281,618 | 1098 | TNIK | 3 | 172,294,982 |
| 1099 | TNIK | 3 | 172,313,766 | 1100 | TNIK | 3 | 172,381,296 |
| 1101 | TNIK | 3 | 172,402,113 | 1102 | TNIK | 3 | 172,428,696 |
| 1103 | TNIK | 3 | 172,715,462 | 1104 | PLD1 | 3 | 172,791,538 |
| 1105 | PLD1 | 3 | 172,935,130 | 1106 | PLD1 | 3 | 172,970,915 |
| 1107 | PLD1 | 3 | 172,984,008 | 1108 | PLD1 | 3 | 172,990,075 |
| 1109 | PLD1 | 3 | 172,991,671 | 1110 | NLGN1 | 3 | 174,810,790 |
| 1111 | NLGN1 | 3 | 174,819,343 | 1112 | NLGN1 | 3 | 174,822,098 |
| 1113 | NLGN1 | 3 | 174,845,437 | 1114 | NLGN1 | 3 | 174,861,258 |
| 1115 | NLGN1 | 3 | 174,879,091 | 1116 | NLGN1 | 3 | 174,967,790 |
| 1117 | NLGN1 | 3 | 174,995,392 | 1118 | NLGN1 | 3 | 175,026,145 |
| 1119 | NLGN1 | 3 | 175,384,416 | 1120 | NLGN1 | 3 | 175,458,980 |
| 1121 | NLGN1 | 3 | 175,478,622 | 1122 | NLGN1 | 3 | 175,493,649 |
| 1123 | NLGN1 | 3 | 175,497,804 | 1124 | NLGN1 | 3 | 175,515,979 |
| 1125 | NLGN1 | 3 | 175,516,080 | 1126 | NLGN1 | 3 | 175,541,931 |
| 1127 | NLGN1 | 3 | 175,543,000 | 1128 | HTR3D | 3 | 185,232,425 |
| 1129 | HTR3D | 3 | 185,236,739 | 1130 | HTR3D | 3 | 185,238,516 |
| 1131 | HTR3C | 3 | 185,276,148 | 1132 | LEPREL1 | 3 | 191,189,805 |
| 1133 | LEPREL1 | 3 | 191,218,155 | 1134 | LEPREL1 | 3 | 191,237,107 |
| 1135 | LEPREL1 | 3 | 191,244,878 | 1136 | LEPREL1 | 3 | 191,331,953 |
| 1137 | LEPREL1 | 3 | 191,356,159 | 1138 | LEPREL1 | 3 | 191,356,831 |
| 1139 | LEPREL1 | 3 | 191,356,896 | 1140 | LEPREL1 | 3 | 191,358,612 |
| 1141 | IL1RAP | 3 | 191,716,532 | 1142 | IL1RAP | 3 | 191,719,452 |
| 1143 | IL1RAP | 3 | 191,825,136 | 1144 | IL1RAP | 3 | 191,859,482 |
| 1145 | LRRC15 | 3 | 195,561,991 | 1146 | LRRC15 | 3 | 195,562,211 |
| 1147 | LRRC15 | 3 | 195,566,153 | 1148 | LRRC15 | 3 | 195,567,372 |
| 1149 | LRRC15 | 3 | 195,569,243 | 1150 | LRRC15 | 3 | 195,586,726 |
| 1151 | UBXD7 | 3 | 197,576,308 | 1152 | UBXD7 | 3 | 197,632,452 |
| 1153 | UBXD7 | 3 | 197,636,526 | 1154 | UBXD7 | 3 | 197,642,729 |
| 1155 | SLC2A9 | 4 | 9,423,554 | 1156 | SLC2A9 | 4 | 9,476,600 |
| 1157 | SLC2A9 | 4 | 9,480,639 | 1158 | SLC2A9 | 4 | 9,500,096 |
| 1159 | SLC2A9 | 4 | 9,531,228 | 1160 | SLC2A9 | 4 | 9,606,210 |
| 1161 | SLC2A9 | 4 | 9,606,401 | 1162 | SLC2A9 | 4 | 9,606,822 |
| 1163 | SLC2A9 | 4 | 9,606,899 | 1164 | SLC2A9 | 4 | 9,613,930 |
| 1165 | SLC2A9 | 4 | 9,616,184 | 1166 | SLC2A9 | 4 | 9,616,373 |
| 1167 | SLC2A9 | 4 | 9,633,401 | 1168 | SLC2A9 | 4 | 9,636,640 |
| 1169 | LDB2 | 4 | 16,106,226 | 1170 | LDB2 | 4 | 16,119,229 |
| 1171 | LDB2 | 4 | 16,128,817 | 1172 | LDB2 | 4 | 16,197,827 |
| 1173 | LDB2 | 4 | 16,200,696 | 1174 | LDB2 | 4 | 16,362,961 |
| 1175 | LDB2 | 4 | 16,379,333 | 1176 | LDB2 | 4 | 16,386,273 |
| 1177 | LDB2 | 4 | 16,387,385 | 1178 | LDB2 | 4 | 16,390,278 |
| 1179 | LDB2 | 4 | 16,410,139 | 1180 | LDB2 | 4 | 16,417,600 |
| 1181 | LDB2 | 4 | 16,498,396 | 1182 | LDB2 | 4 | 16,513,031 |
| 1183 | LDB2 | 4 | 16,515,486 | 1184 | LDB2 | 4 | 16,525,999 |
| 1185 | SLIT2 | 4 | 19,864,404 | 1186 | SLIT2 | 4 | 19,872,156 |
| 1187 | SLIT2 | 4 | 20,162,402 | 1188 | SLIT2 | 4 | 20,172,206 |
| 1189 | SLIT2 | 4 | 20,177,664 | 1190 | SLIT2 | 4 | 20,194,981 |
| 1191 | SLIT2 | 4 | 20,202,844 | 1192 | PPARGC1A | 4 | 23,422,850 |
| 1193 | PPARGC1A | 4 | 23,424,760 | 1194 | PPARGC1A | 4 | 23,439,336 |
| 1195 | PPARGC1A | 4 | 23,445,751 | 1196 | SOD3 | 4 | 24,399,778 |
| 1197 | CCKAR | 4 | 26,098,368 | 1198 | CCKAR | 4 | 26,113,255 |
| 1199 | PCDH7 | 4 | 30,383,181 | 1200 | PCDH7 | 4 | 30,417,378 |
| 1201 | PCDH7 | 4 | 30,420,872 | 1202 | PCDH7 | 4 | 30,440,719 |
| 1203 | PCDH7 | 4 | 30,441,417 | 1204 | KIAA1239 | 4 | 36,941,226 |
| 1205 | KIAA1239 | 4 | 36,945,500 | 1206 | KIAA1239 | 4 | 37,005,415 |
| 1207 | KIAA1239 | 4 | 37,007,192 | 1208 | KIAA1239 | 4 | 37,133,996 |
| 1209 | KIAA1239 | 4 | 37,134,494 | 1210 | KIAA1239 | 4 | 37,140,169 |
| 1211 | KIAA1239 | 4 | 37,157,082 | 1212 | TBCID1 | 4 | 37,815,251 |
| 1213 | UBE2K | 4 | 39,386,342 | 1214 | UBE2K | 4 | 39,494,511 |
| 1215 | N4BP2 | 4 | 39,864,889 | 1216 | LIMCH1 | 4 | 41,179,983 |
| 1217 | LIMCH1 | 4 | 41,257,923 | 1218 | LIMCH1 | 4 | 41,260,644 |
| 1219 | LIMCH1 | 4 | 41,285,436 | 1220 | LIMCH1 | 4 | 41,294,746 |
| 1221 | LIMCH1 | 4 | 41,308,688 | 1222 | LIMCH1 | 4 | 41,314,999 |
| 1223 | LIMCH1 | 4 | 41,354,243 | 1224 | LIMCH1 | 4 | 41,368,361 |
| 1225 | LIMCH1 | 4 | 41,394,864 | 1226 | LIMCH1 | 4 | 41,421,570 |
| 1227 | LIMCH1 | 4 | 41,429,386 | 1228 | LIMCH1 | 4 | 41,433,490 |
| 1229 | LOC389207 | 4 | 42,562,218 | 1230 | LOC389207 | 4 | 42,597,411 |
| 1231 | LPHN3 | 4 | 62,501,063 | 1232 | LPHN3 | 4 | 62,708,418 |
| 1233 | LPHN3 | 4 | 62,719,919 | 1234 | NPFFR2 | 4 | 73,054,817 |
| 1235 | NPFFR2 | 4 | 73,103,842 | 1236 | NPFFR2 | 4 | 73,115,321 |
| 1237 | NPFFR2 | 4 | 73,122,046 | 1238 | NPFFR2 | 4 | 73,122,182 |
| 1239 | NPFFR2 | 4 | 73,143,891 | 1240 | NPFFR2 | 4 | 73,145,571 |
| 1241 | NPFFR2 | 4 | 73,147,681 | 1242 | NPFFR2 | 4 | 73,153,403 |
| 1243 | NPFFR2 | 4 | 73,153,496 | 1244 | NPFFR2 | 4 | 73,154,786 |
| 1245 | NPFFR2 | 4 | 73,160,673 | 1246 | NPFFR2 | 4 | 73,161,337 |
| 1247 | NPFFR2 | 4 | 73,163,818 | 1248 | NPFFR2 | 4 | 73,219,749 |
| 1249 | NPFFR2 | 4 | 73,236,822 | 1250 | NPFFR2 | 4 | 73,263,574 |
| 1251 | NPFFR2 | 4 | 73,279,891 | 1252 | NPFFR2 | 4 | 73,291,379 |
| 1253 | CXCL9 | 4 | 77,140,838 | 1254 | CXCL9 | 4 | 77,152,469 |
| 1255 | SHROOM3 | 4 | 77,819,898 | 1256 | SHROOM3 | 4 | 77,835,586 |
| 1257 | SHROOM3 | 4 | 77,879,755 | 1258 | SHROOM3 | 4 | 77,883,172 |
| 1259 | SHROOM3 | 4 | 77,888,752 | 1260 | SHROOM3 | 4 | 77,944,496 |
| 1261 | SCD5 | 4 | 83,782,853 | 1262 | SCD5 | 4 | 83,794,856 |
| 1263 | SCD5 | 4 | 83,794,931 | 1264 | SCD5 | 4 | 83,803,520 |
| 1265 | SCD5 | 4 | 83,809,123 | 1266 | SCD5 | 4 | 83,816,306 |
| 1267 | SCD5 | 4 | 83,832,656 | 1268 | SCD5 | 4 | 83,843,002 |
| 1269 | SCD5 | 4 | 83,845,049 | 1270 | SCD5 | 4 | 83,847,997 |
| 1271 | SCD5 | 4 | 83,920,815 | 1272 | SCD5 | 4 | 83,923,596 |
| 1273 | SCD5 | 4 | 83,944,297 | 1274 | HERC3 | 4 | 89,711,547 |
| 1275 | HERC3 | 4 | 89,741,644 | 1276 | HERC3 | 4 | 89,751,705 |
| 1277 | HERC3 | 4 | 89,786,790 | 1278 | HERC3 | 4 | 89,803,447 |
| 1279 | HERC3 | 4 | 89,822,108 | 1280 | FAM13A1 | 4 | 89,887,882 |
| 1281 | FAM13A1 | 4 | 89,950,302 | 1282 | FAM13A1 | 4 | 89,950,932 |
| 1283 | FAM13A1 | 4 | 89,952,905 | 1284 | FAM13A1 | 4 | 89,958,502 |
| 1285 | FAM13A1 | 4 | 90,116,396 | 1286 | FAM13A1 | 4 | 90,156,345 |
| 1287 | FAM13A1 | 4 | 90,160,944 | 1288 | FAM13A1 | 4 | 90,213,209 |
| 1289 | FAM13A1 | 4 | 90,214,821 | 1290 | PDLIM5 | 4 | 95,638,542 |
| 1291 | PDLIM5 | 4 | 95,660,333 | 1292 | PDLIM5 | 4 | 95,660,615 |
| 1293 | PDLIM5 | 4 | 95,679,972 | 1294 | PDLIM5 | 4 | 95,701,843 |
| 1295 | PDLIM5 | 4 | 95,715,905 | 1296 | PDLIM5 | 4 | 95,716,677 |
| 1297 | PDLIM5 | 4 | 95,728,786 | 1298 | PDLIM5 | 4 | 95,747,196 |
| 1299 | PDLIM5 | 4 | 95,780,482 | 1300 | PDLIM5 | 4 | 95,781,900 |
| 1301 | PDLIM5 | 4 | 95,791,722 | 1302 | PDLIM5 | 4 | 95,810,999 |
| 1303 | TSPAN5 | 4 | 99,862,201 | 1304 | DKK2 | 4 | 108,063,606 |
| 1305 | DKK2 | 4 | 108,084,600 | 1306 | DKK2 | 4 | 108,236,721 |
| 1307 | PAPSS1 | 4 | 108,757,215 | 1308 | PAPSS1 | 4 | 108,791,600 |
| 1309 | PAPSS1 | 4 | 108,824,661 | 1310 | PAPSS1 | 4 | 108,829,312 |
| 1311 | PAPSS1 | 4 | 108,831,390 | 1312 | PAPSS1 | 4 | 108,846,299 |
| 1313 | PAPSS1 | 4 | 108,901,540 | 1314 | PAPSS1 | 4 | 108,902,359 |
| 1315 | COL25A1 | 4 | 109,933,621 | 1316 | COL25A1 | 4 | 109,934,307 |
| 1317 | COL25A1 | 4 | 109,954,162 | 1318 | COL25A1 | 4 | 109,959,534 |
| 1319 | COL25A1 | 4 | 109,967,676 | 1320 | COL25A1 | 4 | 109,982,367 |
| 1321 | COL25A1 | 4 | 109,987,393 | 1322 | COL25A1 | 4 | 110,046,425 |
| 1323 | COL25A1 | 4 | 110,050,277 | 1324 | COL25A1 | 4 | 110,066,070 |
| 1325 | COL25A1 | 4 | 110,067,552 | 1326 | COL25A1 | 4 | 110,067,736 |
| 1327 | COL25A1 | 4 | 110,166,630 | 1328 | COL25A1 | 4 | 110,173,221 |
| 1329 | COL25A1 | 4 | 110,179,691 | 1330 | COL25A1 | 4 | 110,195,082 |
| 1331 | COL25A1 | 4 | 110,198,580 | 1332 | COL25A1 | 4 | 110,320,625 |
| 1333 | COL25A1 | 4 | 110,322,934 | 1334 | COL25A1 | 4 | 110,351,151 |
| 1335 | COL25A1 | 4 | 110,397,623 | 1336 | COL25A1 | 4 | 110,409,320 |
| 1337 | COL25A1 | 4 | 110,469,277 | 1338 | COL25A1 | 4 | 110,497,932 |
| 1339 | ANK2 | 4 | 114,184,993 | 1340 | ANK2 | 4 | 114,298,380 |
| 1341 | ANK2 | 4 | 114,298,464 | 1342 | ANK2 | 4 | 114,298,576 |
| 1343 | ANK2 | 4 | 114,318,660 | 1344 | ANK2 | 4 | 114,329,441 |
| 1345 | ANK2 | 4 | 114,338,099 | 1346 | ANK2 | 4 | 114,340,609 |
| 1347 | ANK2 | 4 | 114,348,644 | 1348 | ANK2 | 4 | 114,388,294 |
| 1349 | ANK2 | 4 | 114,424,380 | 1350 | ANK2 | 4 | 114,429,212 |
| 1351 | ANK2 | 4 | 114,436,352 | 1352 | ANK2 | 4 | 114,437,446 |
| 1353 | ANK2 | 4 | 114,445,280 | 1354 | ANK2 | 4 | 114,474,018 |
| 1355 | ANK2 | 4 | 114,480,090 | 1356 | ANK2 | 4 | 114,504,770 |
| 1357 | CAMK2D | 4 | 114,620,118 | 1358 | CAMK2D | 4 | 114,648,856 |
| 1359 | CAMK2D | 4 | 114,651,522 | 1360 | CAMK2D | 4 | 114,715,574 |
| 1361 | CAMK2D | 4 | 114,727,378 | 1362 | CAMK2D | 4 | 114,729,956 |
| 1363 | CAMK2D | 4 | 114,766,153 | 1364 | CAMK2D | 4 | 114,772,042 |
| 1365 | CAMK2D | 4 | 114,781,182 | 1366 | CAMK2D | 4 | 114,782,182 |
| 1367 | CAMK2D | 4 | 114,799,352 | 1368 | CAMK2D | 4 | 114,923,416 |
| 1369 | NDST3 | 4 | 119,169,101 | 1370 | NDST3 | 4 | 119,169,326 |
| 1371 | NDST3 | 4 | 119,186,644 | 1372 | NDST3 | 4 | 119,186,984 |
| 1373 | NDST3 | 4 | 119,210,639 | 1374 | NDST3 | 4 | 119,235,665 |
| 1375 | NDST3 | 4 | 119,256,090 | 1376 | NDST3 | 4 | 119,257,098 |
| 1377 | PRSS12 | 4 | 119,462,492 | 1378 | PRSS12 | 4 | 119,488,872 |
| 1379 | PRSS12 | 4 | 119,498,546 | 1380 | GPR103 | 4 | 122,484,922 |
| 1381 | GPR103 | 4 | 122,487,863 | 1382 | GPR103 | 4 | 122,510,972 |
| 1383 | GPR103 | 4 | 122,517,665 | 1384 | GPR103 | 4 | 122,518,528 |
| 1385 | GPR103 | 4 | 122,521,072 | 1386 | MAML3 | 4 | 140,868,325 |
| 1387 | MAML3 | 4 | 140,870,180 | 1388 | MAML3 | 4 | 140,878,048 |
| 1389 | MAML3 | 4 | 140,895,835 | 1390 | MAML3 | 4 | 140,896,430 |
| 1391 | MAML3 | 4 | 140,902,213 | 1392 | MAML3 | 4 | 140,983,797 |
| 1393 | MAML3 | 4 | 141,004,965 | 1394 | MAML3 | 4 | 141,007,145 |
| 1395 | MAML3 | 4 | 141,030,150 | 1396 | MAML3 | 4 | 141,043,992 |
| 1397 | MAML3 | 4 | 141,044,880 | 1398 | MAML3 | 4 | 141,051,231 |
| 1399 | MAML3 | 4 | 141,130,298 | 1400 | MAML3 | 4 | 141,138,533 |
| 1401 | MAML3 | 4 | 141,142,480 | 1402 | IL15 | 4 | 142,734,966 |
| 1403 | IL15 | 4 | 142,737,011 | 1404 | IL15 | 4 | 142,764,901 |
| 1405 | IL15 | 4 | 142,873,534 | 1406 | IL15 | 4 | 142,907,840 |
| 1407 | IL15 | 4 | 142,911,413 | 1408 | IL15 | 4 | 142,916,618 |
| 1409 | IL15 | 4 | 142,924,868 | 1410 | INPP4B | 4 | 143,195,583 |
| 1411 | INPP4B | 4 | 143,201,848 | 1412 | INPP4B | 4 | 143,221,023 |
| 1413 | INPP4B | 4 | 143,222,465 | 1414 | INPP4B | 4 | 143,223,756 |
| 1415 | INPP4B | 4 | 143,242,213 | 1416 | INPP4B | 4 | 143,262,085 |
| 1417 | INPP4B | 4 | 143,269,904 | 1418 | INPP4B | 4 | 143,269,935 |
| 1419 | INPP4B | 4 | 143,275,746 | 1420 | INPP4B | 4 | 143,295,856 |
| 1421 | INPP4B | 4 | 143,380,957 | 1422 | INPP4B | 4 | 143,436,768 |
| 1423 | INPP4B | 4 | 143,476,047 | 1424 | INPP4B | 4 | 143,593,360 |
| 1425 | POU4F2 | 4 | 147,727,101 | 1426 | POU4F2 | 4 | 147,731,368 |
| 1427 | POU4F2 | 4 | 147,739,219 | 1428 | POU4F2 | 4 | 147,748,659 |
| 1429 | POU4F2 | 4 | 147,758,283 | 1430 | POU4F2 | 4 | 147,768,753 |
| 1431 | POU4F2 | 4 | 147,799,157 | 1432 | DCLK2 | 4 | 151,229,912 |
| 1433 | DCLK2 | 4 | 151,230,058 | 1434 | DCLK2 | 4 | 151,230,190 |
| 1435 | DCLK2 | 4 | 151,236,783 | 1436 | DCLK2 | 4 | 151,259,013 |
| 1437 | DCLK2 | 4 | 151,291,338 | 1438 | DCLK2 | 4 | 151,294,657 |
| 1439 | DCLK2 | 4 | 151,355,610 | 1440 | DCLK2 | 4 | 151,366,761 |
| 1441 | DCLK2 | 4 | 151,372,390 | 1442 | DCLK2 | 4 | 151,378,402 |
| 1443 | DCLK2 | 4 | 151,401,865 | 1444 | CTSO | 4 | 157,072,641 |
| 1445 | CTSO | 4 | 157,090,787 | 1446 | CTSO | 4 | 157,091,152 |
| 1447 | CTSO | 4 | 157,119,171 | 1448 | CTSO | 4 | 157,124,684 |
| 1449 | CTSO | 4 | 157,125,805 | 1450 | FSTL5 | 4 | 162,602,916 |
| 1451 | FSTL5 | 4 | 162,608,107 | 1452 | FSTL5 | 4 | 162,696,532 |
| 1453 | FSTL5 | 4 | 162,784,518 | 1454 | FSTL5 | 4 | 162,786,977 |
| 1455 | FSTL5 | 4 | 162,828,621 | 1456 | FSTL5 | 4 | 162,852,707 |
| 1457 | FSTL5 | 4 | 162,863,519 | 1458 | FSTL5 | 4 | 162,901,935 |
| 1459 | FSTL5 | 4 | 162,923,589 | 1460 | FSTL5 | 4 | 162,953,212 |
| 1461 | FSTL5 | 4 | 163,113,553 | 1462 | FSTL5 | 4 | 163,171,406 |
| 1463 | FSTL5 | 4 | 163,172,602 | 1464 | FSTL5 | 4 | 163,204,852 |
| 1465 | FSTL5 | 4 | 163,224,500 | 1466 | FSTL5 | 4 | 163,262,634 |
| 1467 | FSTL5 | 4 | 163,274,178 | 1468 | FSTL5 | 4 | 163,275,058 |
| 1469 | FSTL5 | 4 | 163,282,207 | 1470 | FSTL5 | 4 | 163,306,761 |
| 1471 | FSTL5 | 4 | 163,316,581 | 1472 | FSTL5 | 4 | 163,369,235 |
| 1473 | FSTL5 | 4 | 163,379,495 | 1474 | TLL1 | 4 | 166,984,039 |
| 1475 | TLL1 | 4 | 167,012,651 | 1476 | TLL1 | 4 | 167,017,110 |
| 1477 | TLL1 | 4 | 167,022,978 | 1478 | TLL1 | 4 | 167,186,954 |
| 1479 | TLL1 | 4 | 167,200,417 | 1480 | TLL1 | 4 | 167,215,864 |
| 1481 | TLL1 | 4 | 167,247,157 | 1482 | TLL1 | 4 | 167,250,203 |
| 1483 | PALLD | 4 | 169,678,354 | 1484 | PALLD | 4 | 169,678,426 |
| 1485 | PALLD | 4 | 169,680,592 | 1486 | PALLD | 4 | 169,685,203 |
| 1487 | PALLD | 4 | 169,690,892 | 1488 | PALLD | 4 | 169,693,362 |
| 1489 | PALLD | 4 | 169,693,682 | 1490 | PALLD | 4 | 169,701,141 |
| 1491 | PALLD | 4 | 169,702,565 | 1492 | PALLD | 4 | 169,713,776 |
| 1493 | PALLD | 4 | 169,721,943 | 1494 | PALLD | 4 | 169,766,914 |
| 1495 | PALLD | 4 | 169,828,987 | 1496 | PALLD | 4 | 169,831,329 |
| 1497 | PALLD | 4 | 169,831,979 | 1498 | PALLD | 4 | 169,854,703 |
| 1499 | PALLD | 4 | 169,866,028 | 1500 | PALLD | 4 | 169,894,890 |
| 1501 | PALLD | 4 | 169,910,252 | 1502 | PALLD | 4 | 169,910,404 |
| 1503 | PALLD | 4 | 169,938,153 | 1504 | PALLD | 4 | 169,938,977 |
| 1505 | PALLD | 4 | 169,939,539 | 1506 | PALLD | 4 | 170,077,542 |
| 1507 | PALLD | 4 | 170,085,964 | 1508 | PALLD | 4 | 170,111,195 |
| 1509 | PALLD | 4 | 170,118,492 | 1510 | PALLD | 4 | 170,135,598 |
| 1511 | PALLD | 4 | 170,136,535 | 1512 | PALLD | 4 | 170,137,800 |
| 1513 | ODZ3 | 4 | 183,476,755 | 1514 | ODZ3 | 4 | 183,478,510 |
| 1515 | ODZ3 | 4 | 183,764,260 | 1516 | ODZ3 | 4 | 183,790,373 |
| 1517 | ODZ3 | 4 | 183,876,156 | 1518 | ODZ3 | 4 | 183,917,862 |
| 1519 | ODZ3 | 4 | 183,917,955 | 1520 | ENPP6 | 4 | 185,234,241 |
| 1521 | ENPP6 | 4 | 185,238,625 | 1522 | ENPP6 | 4 | 185,251,384 |
| 1523 | ENPP6 | 4 | 185,254,744 | 1524 | ENPP6 | 4 | 185,258,135 |
| 1525 | ENPP6 | 4 | 185,260,510 | 1526 | ENPP6 | 4 | 185,263,371 |
| 1527 | ENPP6 | 4 | 185,269,255 | 1528 | ENPP6 | 4 | 185,314,773 |
| 1529 | CASP3 | 4 | 185,792,230 | 1530 | AHRR | 5 | 399,636 |
| 1531 | AHRR | 5 | 401,598 | 1532 | AHRR | 5 | 431,413 |
| 1533 | AHRR | 5 | 465,694 | 1534 | AHRR | 5 | 510,955 |
| 1535 | SEMA5A | 5 | 9,066,544 | 1536 | SEMA5A | 5 | 9,066,608 |
| 1537 | SEMA5A | 5 | 9,071,565 | 1538 | SEMA5A | 5 | 9,093,141 |
| 1539 | SEMA5A | 5 | 9,103,410 | 1540 | SEMA5A | 5 | 9,119,802 |
| 1541 | SEMA5A | 5 | 9,474,794 | 1542 | SEMA5A | 5 | 9,477,130 |
| 1543 | SEMA5A | 5 | 9,488,305 | 1544 | SEMA5A | 5 | 9,489,697 |
| 1545 | SEMA5A | 5 | 9,613,249 | 1546 | DNAH5 | 5 | 13,711,926 |
| 1547 | DNAH5 | 5 | 13,776,956 | 1548 | DNAH5 | 5 | 13,780,181 |
| 1549 | DNAH5 | 5 | 13,780,350 | 1550 | DNAH5 | 5 | 13,795,858 |
| 1551 | DNAH5 | 5 | 13,802,952 | 1552 | DNAH5 | 5 | 13,807,394 |
| 1553 | DNAH5 | 5 | 13,822,974 | 1554 | DNAH5 | 5 | 13,832,743 |
| 1555 | DNAH5 | 5 | 13,841,886 | 1556 | DNAH5 | 5 | 13,842,420 |
| 1557 | DNAH5 | 5 | 13,896,485 | 1558 | DNAH5 | 5 | 13,897,249 |
| 1559 | DNAH5 | 5 | 13,897,274 | 1560 | DNAH5 | 5 | 13,953,345 |
| 1561 | DNAH5 | 5 | 13,955,220 | 1562 | DNAH5 | 5 | 13,957,400 |
| 1563 | DNAH5 | 5 | 13,988,491 | 1564 | DNAH5 | 5 | 13,988,683 |
| 1565 | DNAH5 | 5 | 13,988,747 | 1566 | DNAH5 | 5 | 13,989,500 |
| 1567 | DNAH5 | 5 | 14,007,463 | 1568 | DNAH5 | 5 | 14,032,397 |
| 1569 | MYO10 | 5 | 16,711,524 | 1570 | MYO10 | 5 | 16,822,273 |
| 1571 | MYO10 | 5 | 16,836,327 | 1572 | MYO10 | 5 | 16,837,873 |
| 1573 | MYO10 | 5 | 16,838,077 | 1574 | CDH10 | 5 | 24,500,153 |
| 1575 | CDH10 | 5 | 24,533,855 | 1576 | CDH10 | 5 | 24,663,859 |
| 1577 | CDH10 | 5 | 24,727,740 | 1578 | SLC45A2 | 5 | 33,979,974 |
| 1579 | SLC45A2 | 5 | 33,990,637 | 1580 | C1QTNF3 | 5 | 34,083,721 |
| 1581 | SLC1A3 | 5 | 36,644,918 | 1582 | SLC1A3 | 5 | 36,670,315 |
| 1583 | SLC1A3 | 5 | 36,675,215 | 1584 | SLC1A3 | 5 | 36,712,840 |
| 1585 | SLC1A3 | 5 | 36,755,577 | 1586 | SLC1A3 | 5 | 36,755,736 |
| 1587 | EGFLAM | 5 | 38,246,651 | 1588 | EGFLAM | 5 | 38,307,878 |
| 1589 | EGFLAM | 5 | 38,337,535 | 1590 | EGFLAM | 5 | 38,357,270 |
| 1591 | EGFLAM | 5 | 38,357,424 | 1592 | EGFLAM | 5 | 38,382,422 |
| 1593 | EGFLAM | 5 | 38,386,400 | 1594 | EGFLAM | 5 | 38,402,419 |
| 1595 | EGFLAM | 5 | 38,450,087 | 1596 | EGFLAM | 5 | 38,485,966 |
| 1597 | EGFLAM | 5 | 38,492,523 | 1598 | EGFLAM | 5 | 38,502,504 |
| 1599 | ITGA1 | 5 | 52,114,759 | 1600 | ITGA1 | 5 | 52,130,669 |
| 1601 | ITGA1 | 5 | 52,133,521 | 1602 | ITGA1 | 5 | 52,134,676 |
| 1603 | ITGA1 | 5 | 52,146,916 | 1604 | ITGA1 | 5 | 52,149,807 |
| 1605 | ITGA1 | 5 | 52,155,113 | 1606 | ITGA1 | 5 | 52,185,286 |
| 1607 | ITGA1 | 5 | 52,194,858 | 1608 | ITGA1 | 5 | 52,223,785 |
| 1609 | ITGA1 | 5 | 52,231,264 | 1610 | ITGA1 | 5 | 52,250,338 |
| 1611 | ITGA1 | 5 | 52,259,107 | 1612 | ITGA1 | 5 | 52,265,502 |
| 1613 | ITGA1 | 5 | 52,277,790 | 1614 | ITGA1 | 5 | 52,278,143 |
| 1615 | ITGA1 | 5 | 52,285,233 | 1616 | ITGA1 | 5 | 52,289,413 |
| 1617 | ITGA2 | 5 | 52,369,177 | 1618 | ITGA2 | 5 | 52,376,821 |
| 1619 | ITGA2 | 5 | 52,388,590 | 1620 | ITGA2 | 5 | 52,402,662 |
| 1621 | ITGA2 | 5 | 52,425,212 | 1622 | PDE4D | 5 | 58,313,749 |
| 1623 | PDE4D | 5 | 58,367,198 | 1624 | PDE4D | 5 | 58,406,595 |
| 1625 | PDE4D | 5 | 58,429,089 | 1626 | PDE4D | 5 | 58,431,868 |
| 1627 | PDE4D | 5 | 58,432,005 | 1628 | PDE4D | 5 | 58,681,562 |
| 1629 | PDE4D | 5 | 58,712,773 | 1630 | PDE4D | 5 | 58,715,241 |
| 1631 | PDE4D | 5 | 58,895,884 | 1632 | PDE4D | 5 | 58,917,427 |
| 1633 | PDE4D | 5 | 58,935,951 | 1634 | PDE4D | 5 | 58,936,088 |
| 1635 | PDE4D | 5 | 58,941,002 | 1636 | ELOVL7 | 5 | 60,152,637 |
| 1637 | ELOVL7 | 5 | 60,152,959 | 1638 | ELOVL7 | 5 | 60,171,742 |
| 1639 | TNPO1 | 5 | 72,120,843 | 1640 | TNPO1 | 5 | 72,172,369 |
| 1641 | TNPO1 | 5 | 72,182,236 | 1642 | TNPO1 | 5 | 72,185,181 |
| 1643 | TNPO1 | 5 | 72,217,160 | 1644 | TNPO1 | 5 | 72,292,936 |
| 1645 | FCHO2 | 5 | 72,374,865 | 1646 | FCHO2 | 5 | 72,384,028 |
| 1647 | FCHO2 | 5 | 72,426,767 | 1648 | FCHO2 | 5 | 72,429,851 |
| 1649 | FCHO2 | 5 | 72,430,491 | 1650 | CMYA5 | 5 | 79,029,508 |
| 1651 | CMYA5 | 5 | 79,058,467 | 1652 | CMYA5 | 5 | 79,122,639 |
| 1653 | CMYA5 | 5 | 79,136,873 | 1654 | THBS4 | 5 | 79,356,433 |
| 1655 | THBS4 | 5 | 79,356,634 | 1656 | THBS4 | 5 | 79,375,707 |
| 1657 | THBS4 | 5 | 79,376,918 | 1658 | THBS4 | 5 | 79,387,300 |
| 1659 | THBS4 | 5 | 79,397,021 | 1660 | THBS4 | 5 | 79,411,480 |
| 1661 | THBS4 | 5 | 79,415,294 | 1662 | THBS4 | 5 | 79,425,956 |
| 1663 | VCAN | 5 | 82,795,773 | 1664 | VCAN | 5 | 82,798,333 |
| 1665 | VCAN | 5 | 82,806,912 | 1666 | VCAN | 5 | 82,818,286 |
| 1667 | VCAN | 5 | 82,822,305 | 1668 | VCAN | 5 | 82,851,164 |
| 1669 | VCAN | 5 | 82,869,125 | 1670 | VCAN | 5 | 82,873,387 |
| 1671 | VCAN | 5 | 82,875,330 | 1672 | VCAN | 5 | 82,900,222 |
| 1673 | VCAN | 5 | 82,914,275 | 1674 | MEF2C | 5 | 88,077,688 |
| 1675 | MEF2C | 5 | 88,091,517 | 1676 | MEF2C | 5 | 88,138,619 |
| 1677 | MEF2C | 5 | 88,161,609 | 1678 | MEF2C | 5 | 88,193,308 |
| 1679 | MEF2C | 5 | 88,216,865 | 1680 | GPR98 | 5 | 89,882,699 |
| 1681 | GPR98 | 5 | 89,899,035 | 1682 | GPR98 | 5 | 89,923,439 |
| 1683 | GPR98 | 5 | 89,976,245 | 1684 | GPR98 | 5 | 89,988,287 |
| 1685 | GPR98 | 5 | 89,992,773 | 1686 | GPR98 | 5 | 90,015,345 |
| 1687 | GPR98 | 5 | 90,020,637 | 1688 | GPR98 | 5 | 90,024,260 |
| 1689 | GPR98 | 5 | 90,026,080 | 1690 | GPR98 | 5 | 90,071,845 |
| 1691 | GPR98 | 5 | 90,078,258 | 1692 | GPR98 | 5 | 90,203,767 |
| 1693 | GPR98 | 5 | 90,444,837 | 1694 | CAST | 5 | 96,112,090 |
| 1695 | CAST | 5 | 96,112,771 | 1696 | CAST | 5 | 96,114,802 |
| 1697 | FBXL17 | 5 | 107,223,636 | 1698 | FBXL17 | 5 | 107,224,897 |
| 1699 | FBXL17 | 5 | 107,256,661 | 1700 | FBXL17 | 5 | 107,283,768 |
| 1701 | FBXL17 | 5 | 107,381,014 | 1702 | FBXL17 | 5 | 107,423,133 |
| 1703 | FBXL17 | 5 | 107,433,375 | 1704 | FBXL17 | 5 | 107,441,485 |
| 1705 | FBXL17 | 5 | 107,513,060 | 1706 | FBXL17 | 5 | 107,527,862 |
| 1707 | FBXL17 | 5 | 107,540,044 | 1708 | FBXL17 | 5 | 107,546,460 |
| 1709 | FBXL17 | 5 | 107,584,601 | 1710 | FBXL17 | 5 | 107,598,684 |
| 1711 | FBXL17 | 5 | 107,614,682 | 1712 | FBXL17 | 5 | 107,641,934 |
| 1713 | FBXL17 | 5 | 107,681,849 | 1714 | FBXL17 | 5 | 107,705,110 |
| 1715 | FBXL17 | 5 | 107,715,515 | 1716 | FBXL17 | 5 | 107,716,753 |
| 1717 | FBXL17 | 5 | 107,773,275 | 1718 | FBXL17 | 5 | 107,810,930 |
| 1719 | FBXL17 | 5 | 107,833,753 | 1720 | PJA2 | 5 | 108,713,575 |
| 1721 | PJA2 | 5 | 108,727,060 | 1722 | PJA2 | 5 | 108,742,197 |
| 1723 | PJA2 | 5 | 108,787,364 | 1724 | KCNN2 | 5 | 113,739,288 |
| 1725 | KCNN2 | 5 | 113,759,422 | 1726 | KCNN2 | 5 | 113,763,996 |
| 1727 | KCNN2 | 5 | 113,766,613 | 1728 | KCNN2 | 5 | 113,784,704 |
| 1729 | KCNN2 | 5 | 113,836,263 | 1730 | KCNN2 | 5 | 113,858,701 |
| 1731 | KCNN2 | 5 | 113,879,949 | 1732 | SEMA6A | 5 | 115,803,210 |
| 1733 | SEMA6A | 5 | 115,816,311 | 1734 | SEMA6A | 5 | 115,823,087 |
| 1735 | SEMA6A | 5 | 115,914,844 | 1736 | SEMA6A | 5 | 115,919,012 |
| 1737 | SEMA6A | 5 | 115,967,240 | 1738 | HSD17B4 | 5 | 118,865,967 |
| 1739 | HSD17B4 | 5 | 118,872,179 | 1740 | HSD17B4 | 5 | 118,872,385 |
| 1741 | HSD17B4 | 5 | 118,915,055 | 1742 | HSD17B4 | 5 | 118,918,814 |
| 1743 | HSD17B4 | 5 | 118,927,674 | 1744 | LOC340069 | 5 | 118,989,273 |
| 1745 | LOC340069 | 5 | 118,992,036 | 1746 | LOC340069 | 5 | 118,997,859 |
| 1747 | FTMT | 5 | 121,238,114 | 1748 | SNCAIP | 5 | 121,656,692 |
| 1749 | SNCAIP | 5 | 121,699,768 | 1750 | SNCAIP | 5 | 121,757,816 |
| 1751 | SNCAIP | 5 | 121,768,808 | 1752 | SNCAIP | 5 | 121,778,228 |
| 1753 | SNCAIP | 5 | 121,796,570 | 1754 | SNCAIP | 5 | 121,807,289 |
| 1755 | SNCAIP | 5 | 121,824,037 | 1756 | SNCAIP | 5 | 121,831,417 |
| 1757 | SNCAIP | 5 | 121,854,840 | 1758 | SNX2 | 5 | 122,116,630 |
| 1759 | SNX2 | 5 | 122,174,518 | 1760 | SNX2 | 5 | 122,201,930 |
| 1761 | SNX24 | 5 | 122,237,091 | 1762 | SNX24 | 5 | 122,273,273 |
| 1763 | SNX24 | 5 | 122,283,900 | 1764 | SNX24 | 5 | 122,295,903 |
| 1765 | SNX24 | 5 | 122,309,550 | 1766 | ADAMTS19 | 5 | 128,850,315 |
| 1767 | ADAMTS19 | 5 | 129,039,887 | 1768 | ADAMTS19 | 5 | 129,043,351 |
| 1769 | ADAMTS19 | 5 | 129,078,440 | 1770 | VDAC1 | 5 | 133,352,457 |
| 1771 | VDAC1 | 5 | 133,392,157 | 1772 | VDAC1 | 5 | 133,405,061 |
| 1773 | TRPC7 | 5 | 135,551,643 | 1774 | TRPC7 | 5 | 135,641,325 |
| 1775 | TRPC7 | 5 | 135,680,121 | 1776 | TRPC7 | 5 | 135,683,035 |
| 1777 | TRPC7 | 5 | 135,705,746 | 1778 | TRPC7 | 5 | 135,708,380 |
| 1779 | TRPC7 | 5 | 135,713,994 | 1780 | CTNNA1 | 5 | 138,200,119 |
| 1781 | CTNNA1 | 5 | 138,216,610 | 1782 | CTNNA1 | 5 | 138,254,666 |
| 1783 | CTNNA1 | 5 | 138,264,654 | 1784 | CTNNA1 | 5 | 138,289,570 |
| 1785 | CTNNA1 | 5 | 138,298,631 | 1786 | CTNNA1 | 5 | 138,300,046 |
| 1787 | ODZ2 | 5 | 167,085,900 | 1788 | ODZ2 | 5 | 167,105,972 |
| 1789 | ODZ2 | 5 | 167,191,250 | 1790 | ODZ2 | 5 | 167,391,524 |
| 1791 | ODZ2 | 5 | 167,400,913 | 1792 | ODZ2 | 5 | 167,485,949 |
| 1793 | ODZ2 | 5 | 167,486,071 | 1794 | ODZ2 | 5 | 167,486,458 |
| 1795 | ODZ2 | 5 | 167,491,001 | 1796 | ODZ2 | 5 | 167,527,141 |
| 1797 | ODZ2 | 5 | 167,576,871 | 1798 | ODZ2 | 5 | 167,606,948 |
| 1799 | ODZ2 | 5 | 167,634,311 | 1800 | WWC1 | 5 | 167,705,652 |
| 1801 | WWC1 | 5 | 167,720,663 | 1802 | WWC1 | 5 | 167,819,115 |
| 1803 | GABRP | 5 | 170,134,117 | 1804 | GABRP | 5 | 170,143,829 |
| 1805 | GABRP | 5 | 170,147,972 | 1806 | SERPINB6 | 6 | 2,926,223 |
| 1807 | SLC22A23 | 6 | 3,215,063 | 1808 | SLC22A23 | 6 | 3,222,297 |
| 1809 | SLC22A23 | 6 | 3,281,912 | 1810 | SLC22A23 | 6 | 3,282,785 |
| 1811 | SLC22A23 | 6 | 3,284,105 | 1812 | SLC22A23 | 6 | 3,395,265 |
| 1813 | SLC22A23 | 6 | 3,398,658 | 1814 | NEDD9 | 6 | 11,294,417 |
| 1815 | NEDD9 | 6 | 11,302,962 | 1816 | PHACTR1 | 6 | 12,845,008 |
| 1817 | PHACTR1 | 6 | 12,858,919 | 1818 | PHACTR1 | 6 | 12,989,841 |
| 1819 | PHACTR1 | 6 | 13,002,890 | 1820 | PHACTR1 | 6 | 13,006,278 |
| 1821 | PHACTR1 | 6 | 13,035,530 | 1822 | PHACTR1 | 6 | 13,035,831 |
| 1823 | PHACTR1 | 6 | 13,286,048 | 1824 | PHACTR1 | 6 | 13,297,254 |
| 1825 | PHACTR1 | 6 | 13,373,352 | 1826 | JARID2 | 6 | 15,388,186 |
| 1827 | JARID2 | 6 | 15,449,354 | 1828 | JARID2 | 6 | 15,499,187 |
| 1829 | JARID2 | 6 | 15,512,229 | 1830 | JARID2 | 6 | 15,516,507 |
| 1831 | JARID2 | 6 | 15,537,710 | 1832 | JARID2 | 6 | 15,567,913 |
| 1833 | JARID2 | 6 | 15,593,357 | 1834 | JARID2 | 6 | 15,624,264 |
| 1835 | ATXN1 | 6 | 16,595,385 | 1836 | ATXN1 | 6 | 16,755,970 |
| 1837 | ATXN1 | 6 | 16,785,550 | 1838 | ATXN1 | 6 | 16,808,077 |
| 1839 | RNF144B | 6 | 18,530,528 | 1840 | RNF144B | 6 | 18,546,855 |
| 1841 | RNF144B | 6 | 18,563,593 | 1842 | RNF144B | 6 | 18,566,740 |
| 1843 | RNF144B | 6 | 18,568,182 | 1844 | RNF144B | 6 | 18,574,729 |
| 1845 | SLC17A4 | 6 | 25,848,481 | 1846 | SLC17A4 | 6 | 25,861,619 |
| 1847 | SLC17A4 | 6 | 25,872,171 | 1848 | SLC17A4 | 6 | 25,876,893 |
| 1849 | SLC17A4 | 6 | 25,880,026 | 1850 | SLC17A4 | 6 | 25,887,371 |
| 1851 | SLC17A4 | 6 | 25,890,293 | 1852 | SLC17A4 | 6 | 25,900,229 |
| 1853 | SLC17A1 | 6 | 25,909,950 | 1854 | SLC17A1 | 6 | 25,921,129 |
| 1855 | SLC17A1 | 6 | 25,937,612 | 1856 | SLC17A1 | 6 | 25,937,638 |
| 1857 | SLC17A1 | 6 | 25,950,182 | 1858 | SLC17A3 | 6 | 25,971,584 |
| 1859 | SLC17A3 | 6 | 25,972,341 | 1860 | SLC17A3 | 6 | 25,972,877 |
| 1861 | SLC17A3 | 6 | 25,973,245 | 1862 | SLC17A3 | 6 | 25,978,521 |
| 1863 | SLC17A3 | 6 | 25,993,793 | 1864 | SLC17A2 | 6 | 26,009,112 |
| 1865 | SLC17A2 | 6 | 26,020,795 | 1866 | SLC17A2 | 6 | 26,022,056 |
| 1867 | SLC17A2 | 6 | 26,032,492 | 1868 | SLC17A2 | 6 | 26,042,503 |
| 1869 | SLC17A2 | 6 | 26,065,387 | 1870 | SLC17A2 | 6 | 26,067,106 |
| 1871 | SLC17A2 | 6 | 26,068,488 | 1872 | BTN3A1 | 6 | 26,506,534 |
| 1873 | BTN3A1 | 6 | 26,525,105 | 1874 | BTN3A3 | 6 | 26,559,532 |
| 1875 | MSH5 | 6 | 31,838,993 | 1876 | BTNL2 | 6 | 32,469,155 |
| 1877 | BTNL2 | 6 | 32,471,430 | 1878 | BTNL2 | 6 | 32,471,794 |
| 1879 | BRD2 | 6 | 32,961,584 | 1880 | LRFN2 | 6 | 40,462,772 |
| 1881 | LRFN2 | 6 | 40,635,612 | 1882 | PPP2R5D | 6 | 43,066,878 |
| 1883 | KLC4 | 6 | 43,173,891 | 1884 | PARC | 6 | 43,277,865 |
| 1885 | ABCC10 | 6 | 43,504,834 | 1886 | TJAP1 | 6 | 43,604,640 |
| 1887 | TJAP1 | 6 | 43,636,419 | 1888 | ELOVL5 | 6 | 53,221,300 |
| 1889 | ELOVL5 | 6 | 53,238,244 | 1890 | ELOVL5 | 6 | 53,267,506 |
| 1891 | ELOVL5 | 6 | 53,280,718 | 1892 | ELOVL5 | 6 | 53,296,096 |
| 1893 | ELOVL5 | 6 | 53,298,093 | 1894 | ELOVL5 | 6 | 53,298,209 |
| 1895 | ELOVL5 | 6 | 53,350,763 | 1896 | ELOVL5 | 6 | 53,372,444 |
| 1897 | ELOVL5 | 6 | 53,386,201 | 1898 | RIMS1 | 6 | 72,772,376 |
| 1899 | RIMS1 | 6 | 72,784,876 | 1900 | RIMS1 | 6 | 72,799,111 |
| 1901 | RIMS1 | 6 | 72,806,741 | 1902 | RIMS1 | 6 | 72,843,114 |
| 1903 | RIMS1 | 6 | 72,860,627 | 1904 | RIMS1 | 6 | 72,910,499 |
| 1905 | RIMS1 | 6 | 72,939,135 | 1906 | RIMS1 | 6 | 72,967,122 |
| 1907 | RIMS1 | 6 | 72,982,413 | 1908 | RIMS1 | 6 | 73,021,641 |
| 1909 | RIMS1 | 6 | 73,031,069 | 1910 | RIMS1 | 6 | 73,052,051 |
| 1911 | RIMS1 | 6 | 73,063,804 | 1912 | RIMS1 | 6 | 73,113,269 |
| 1913 | RIMS1 | 6 | 73,114,364 | 1914 | RIMS1 | 6 | 73,118,107 |
| 1915 | RIMS1 | 6 | 73,148,099 | 1916 | RIMS1 | 6 | 73,166,669 |
| 1917 | RIMS1 | 6 | 73,170,109 | 1918 | GABRR2 | 6 | 90,024,574 |
| 1919 | GABRR2 | 6 | 90,034,625 | 1920 | GABRR2 | 6 | 90,069,593 |
| 1921 | KLHL32 | 6 | 97,549,988 | 1922 | KLHL32 | 6 | 97,602,178 |
| 1923 | KLHL32 | 6 | 97,632,117 | 1924 | KLHL32 | 6 | 97,643,903 |
| 1925 | KLHL32 | 6 | 97,673,659 | 1926 | SLC22A16 | 6 | 110,850,843 |
| 1927 | SLC22A16 | 6 | 110,853,761 | 1928 | SLC22A16 | 6 | 110,857,245 |
| 1929 | SLC22A16 | 6 | 110,870,568 | 1930 | SLC22A16 | 6 | 110,897,601 |
| 1931 | SLC22A16 | 6 | 110,900,785 | 1932 | SLC22A16 | 6 | 110,903,098 |
| 1933 | SLC22A16 | 6 | 110,914,475 | 1934 | HS3ST5 | 6 | 114,502,447 |
| 1935 | TRDN | 6 | 123,553,000 | 1936 | TRDN | 6 | 123,728,987 |
| 1937 | TRDN | 6 | 123,738,465 | 1938 | TRDN | 6 | 123,743,637 |
| 1939 | TRDN | 6 | 123,749,431 | 1940 | TRDN | 6 | 123,753,816 |
| 1941 | TRDN | 6 | 123,766,181 | 1942 | TRDN | 6 | 123,774,707 |
| 1943 | TRDN | 6 | 123,862,152 | 1944 | TRDN | 6 | 123,865,649 |
| 1945 | TRDN | 6 | 123,871,263 | 1946 | TRDN | 6 | 123,875,156 |
| 1947 | TRDN | 6 | 123,877,575 | 1948 | TRDN | 6 | 123,878,251 |
| 1949 | TRDN | 6 | 123,931,045 | 1950 | TRDN | 6 | 123,991,308 |
| 1951 | TRDN | 6 | 124,006,657 | 1952 | TRDN | 6 | 124,017,012 |
| 1953 | NKAIN2 | 6 | 124,086,439 | 1954 | NKAIN2 | 6 | 124,145,158 |
| 1955 | NKAIN2 | 6 | 124,173,325 | 1956 | NKAIN2 | 6 | 124,174,594 |
| 1957 | NKAIN2 | 6 | 124,462,813 | 1958 | NKAIN2 | 6 | 124,473,210 |
| 1959 | NKAIN2 | 6 | 124,481,807 | 1960 | NKAIN2 | 6 | 124,488,366 |
| 1961 | NKAIN2 | 6 | 124,492,154 | 1962 | NKAIN2 | 6 | 124,658,216 |
| 1963 | NKAIN2 | 6 | 124,742,885 | 1964 | NKAIN2 | 6 | 124,850,664 |
| 1965 | NKAIN2 | 6 | 124,859,016 | 1966 | NKAIN2 | 6 | 124,953,233 |
| 1967 | NKAIN2 | 6 | 124,962,839 | 1968 | NKAIN2 | 6 | 124,977,809 |
| 1969 | NKAIN2 | 6 | 124,987,301 | 1970 | NKAIN2 | 6 | 125,020,491 |
| 1971 | NKAIN2 | 6 | 125,198,148 | 1972 | EYA4 | 6 | 133,617,346 |
| 1973 | EYA4 | 6 | 133,625,496 | 1974 | EYA4 | 6 | 133,672,254 |
| 1975 | EYA4 | 6 | 133,674,026 | 1976 | EYA4 | 6 | 133,678,316 |
| 1977 | EYA4 | 6 | 133,790,074 | 1978 | EYA4 | 6 | 133,876,222 |
| 1979 | PDE7B | 6 | 136,206,400 | 1980 | PDE7B | 6 | 136,244,527 |
| 1981 | PDE7B | 6 | 136,251,409 | 1982 | PDE7B | 6 | 136,262,109 |
| 1983 | PDE7B | 6 | 136,263,312 | 1984 | PDE7B | 6 | 136,308,009 |
| 1985 | PDE7B | 6 | 136,313,220 | 1986 | PDE7B | 6 | 136,326,169 |
| 1987 | PDE7B | 6 | 136,346,863 | 1988 | PDE7B | 6 | 136,357,577 |
| 1989 | PDE7B | 6 | 136,408,668 | 1990 | PLAGL1 | 6 | 144,319,261 |
| 1991 | PLAGL1 | 6 | 144,326,195 | 1992 | PLAGL1 | 6 | 144,345,108 |
| 1993 | PLAGL1 | 6 | 144,355,380 | 1994 | STX11 | 6 | 144,498,222 |
| 1995 | STX11 | 6 | 144,554,694 | 1996 | STX11 | 6 | 144,584,781 |
| 1997 | UTRN | 6 | 144,651,202 | 1998 | UTRN | 6 | 144,665,805 |
| 1999 | UTRN | 6 | 144,698,346 | 2000 | UTRN | 6 | 144,723,376 |
| 2001 | UTRN | 6 | 144,728,467 | 2002 | UTRN | 6 | 144,943,208 |
| 2003 | SYNE1 | 6 | 152,485,437 | 2004 | SYNE1 | 6 | 152,511,829 |
| 2005 | SYNE1 | 6 | 152,549,890 | 2006 | SYNE1 | 6 | 152,683,133 |
| 2007 | SYNE1 | 6 | 152,683,299 | 2008 | SYNE1 | 6 | 152,685,563 |
| 2009 | TFB1M | 6 | 155,621,092 | 2010 | TFB1M | 6 | 155,621,249 |
| 2011 | TFB1M | 6 | 155,663,514 | 2012 | TFB1M | 6 | 155,686,995 |
| 2013 | SLC22A3 | 6 | 160,754,505 | 2014 | SLC22A3 | 6 | 160,762,527 |
| 2015 | SLC22A3 | 6 | 160,783,522 | 2016 | PARK2 | 6 | 161,894,294 |
| 2017 | PARK2 | 6 | 161,894,696 | 2018 | PARK2 | 6 | 161,910,473 |
| 2019 | PARK2 | 6 | 161,921,426 | 2020 | PARK2 | 6 | 161,941,630 |
| 2021 | PARK2 | 6 | 161,952,077 | 2022 | PARK2 | 6 | 161,960,395 |
| 2023 | PARK2 | 6 | 162,001,625 | 2024 | PARK2 | 6 | 162,001,753 |
| 2025 | PARK2 | 6 | 162,026,087 | 2026 | PARK2 | 6 | 162,194,371 |
| 2027 | PARK2 | 6 | 162,199,188 | 2028 | PARK2 | 6 | 162,199,563 |
| 2029 | PARK2 | 6 | 162,201,523 | 2030 | PARK2 | 6 | 162,204,134 |
| 2031 | PARK2 | 6 | 162,651,333 | 2032 | PARK2 | 6 | 162,656,326 |
| 2033 | PARK2 | 6 | 162,666,256 | 2034 | PARK2 | 6 | 162,666,349 |
| 2035 | PARK2 | 6 | 162,709,903 | 2036 | PARK2 | 6 | 162,719,593 |
| 2037 | PARK2 | 6 | 162,724,935 | 2038 | PARK2 | 6 | 162,725,125 |
| 2039 | PARK2 | 6 | 162,728,999 | 2040 | PARK2 | 6 | 162,770,133 |
| 2041 | PARK2 | 6 | 162,782,182 | 2042 | PARK2 | 6 | 162,795,324 |
| 2043 | PARK2 | 6 | 162,871,284 | 2044 | PARK2 | 6 | 162,891,538 |
| 2045 | PARK2 | 6 | 162,902,279 | 2046 | PARK2 | 6 | 162,916,186 |
| 2047 | PARK2 | 6 | 162,947,100 | 2048 | PARK2 | 6 | 162,960,031 |
| 2049 | PARK2 | 6 | 163,103,553 | 2050 | PACRG | 6 | 163,515,155 |
| 2051 | PACRG | 6 | 163,520,215 | 2052 | PACRG | 6 | 163,520,791 |
| 2053 | PACRG | 6 | 163,523,252 | 2054 | PACRG | 6 | 163,571,731 |
| 2055 | PDE10A | 6 | 165,679,905 | 2056 | PDE10A | 6 | 165,711,808 |
| 2057 | PDE10A | 6 | 165,714,078 | 2058 | PDE10A | 6 | 165,741,392 |
| 2059 | PDE10A | 6 | 165,787,781 | 2060 | PDE10A | 6 | 165,834,350 |
| 2061 | PDE10A | 6 | 165,835,911 | 2062 | PDE10A | 6 | 165,840,748 |
| 2063 | PDE10A | 6 | 165,868,541 | 2064 | PDE10A | 6 | 165,883,564 |
| 2065 | PDE10A | 6 | 166,023,863 | 2066 | CARD11 | 7 | 2,917,872 |
| 2067 | CARD11 | 7 | 2,923,531 | 2068 | CARD11 | 7 | 2,928,819 |
| 2069 | CARD11 | 7 | 2,985,379 | 2070 | SDK1 | 7 | 4,118,110 |
| 2071 | SDK1 | 7 | 4,118,615 | 2072 | SDK1 | 7 | 4,140,139 |
| 2073 | SDK1 | 7 | 4,152,211 | 2074 | SDK1 | 7 | 4,152,228 |
| 2075 | SDK1 | 7 | 4,153,102 | 2076 | SDK1 | 7 | 4,158,337 |
| 2077 | SDK1 | 7 | 4,162,572 | 2078 | SDK1 | 7 | 4,174,523 |
| 2079 | SDK1 | 7 | 4,174,875 | 2080 | SDK1 | 7 | 4,214,383 |
| 2081 | SDK1 | 7 | 4,230,185 | 2082 | SDK1 | 7 | 4,272,360 |
| 2083 | NXPH1 | 7 | 8,578,640 | 2084 | NXPH1 | 7 | 8,589,612 |
| 2085 | NXPH1 | 7 | 8,600,283 | 2086 | NXPH1 | 7 | 8,608,391 |
| 2087 | NXPH1 | 7 | 8,647,759 | 2088 | NXPH1 | 7 | 8,662,332 |
| 2089 | NXPH1 | 7 | 8,700,069 | 2090 | NXPH1 | 7 | 8,780,133 |
| 2091 | SCIN | 7 | 12,576,204 | 2092 | SCIN | 7 | 12,576,513 |
| 2093 | SCIN | 7 | 12,579,777 | 2094 | SCIN | 7 | 12,634,312 |
| 2095 | ETV1 | 7 | 13,906,357 | 2096 | ETV1 | 7 | 13,945,334 |
| 2097 | ETV1 | 7 | 13,982,894 | 2098 | ETV1 | 7 | 13,987,646 |
| 2099 | ETV1 | 7 | 13,996,042 | 2100 | SNX13 | 7 | 17,861,458 |
| 2101 | SNX13 | 7 | 17,937,235 | 2102 | SNX13 | 7 | 17,974,835 |
| 2103 | FERD3L | 7 | 19,153,324 | 2104 | FERD3L | 7 | 19,164,657 |
| 2105 | FERD3L | 7 | 19,167,340 | 2106 | FERD3L | 7 | 19,346,900 |
| 2107 | FERD3L | 7 | 19,353,440 | 2108 | FERD3L | 7 | 19,353,457 |
| 2109 | FERD3L | 7 | 19,354,351 | 2110 | STK31 | 7 | 23,742,002 |
| 2111 | STK31 | 7 | 23,760,407 | 2112 | STK31 | 7 | 23,859,818 |
| 2113 | STK31 | 7 | 23,906,389 | 2114 | NPY | 7 | 24,297,290 |
| 2115 | NPY | 7 | 24,298,324 | 2116 | SKAP2 | 7 | 26,917,430 |
| 2117 | SKAP2 | 7 | 26,969,979 | 2118 | SKAP2 | 7 | 26,982,204 |
| 2119 | CREB5 | 7 | 28,798,822 | 2120 | CREB5 | 7 | 28,804,778 |
| 2121 | CREB5 | 7 | 28,811,671 | 2122 | CREB5 | 7 | 28,812,569 |
| 2123 | CREB5 | 7 | 28,815,049 | 2124 | CREB5 | 7 | 28,818,987 |
| 2125 | CREB5 | 7 | 28,870,041 | 2126 | CREB5 | 7 | 28,906,935 |
| 2127 | CHN2 | 7 | 29,215,509 | 2128 | CHN2 | 7 | 29,483,175 |
| 2129 | SCRN1 | 7 | 29,926,736 | 2130 | SCRN1 | 7 | 29,929,111 |
| 2131 | SCRN1 | 7 | 29,929,459 | 2132 | SCRN1 | 7 | 30,010,342 |
| 2133 | SCRN1 | 7 | 30,011,939 | 2134 | PLEKHA8 | 7 | 30,034,151 |
| 2135 | PLEKHA8 | 7 | 30,037,069 | 2136 | SCRN1 | 7 | 30,052,432 |
| 2137 | PLEKHA8 | 7 | 30,083,942 | 2138 | PLEKHA8 | 7 | 30,097,689 |
| 2139 | PLEKHA8 | 7 | 30,099,727 | 2140 | CRHR2 | 7 | 30,663,882 |
| 2141 | CRHR2 | 7 | 30,665,429 | 2142 | CRHR2 | 7 | 30,676,000 |
| 2143 | CRHR2 | 7 | 30,775,386 | 2144 | FLJ22374 | 7 | 30,787,631 |
| 2145 | FLJ22374 | 7 | 30,803,801 | 2146 | FLJ22374 | 7 | 30,832,290 |
| 2147 | FLJ22374 | 7 | 30,842,957 | 2148 | FLJ22374 | 7 | 30,843,167 |
| 2149 | FLJ22374 | 7 | 30,860,754 | 2150 | FLJ22374 | 7 | 30,865,222 |
| 2151 | FLJ22374 | 7 | 30,880,636 | 2152 | PDE1C | 7 | 31,794,059 |
| 2153 | PDE1C | 7 | 31,815,231 | 2154 | PDE1C | 7 | 31,931,223 |
| 2155 | PDE1C | 7 | 31,968,183 | 2156 | PDE1C | 7 | 31,979,118 |
| 2157 | PDE1C | 7 | 32,001,981 | 2158 | PDE1C | 7 | 32,037,670 |
| 2159 | PDE1C | 7 | 32,064,508 | 2160 | PDE1C | 7 | 32,094,250 |
| 2161 | PDE1C | 7 | 32,095,407 | 2162 | PDE1C | 7 | 32,167,820 |
| 2163 | BMPER | 7 | 33,934,543 | 2164 | BMPER | 7 | 33,942,093 |
| 2165 | BMPER | 7 | 34,056,348 | 2166 | BMPER | 7 | 34,067,083 |
| 2167 | BMPER | 7 | 34,077,080 | 2168 | BMPER | 7 | 34,077,746 |
| 2169 | BMPER | 7 | 34,107,862 | 2170 | BMPER | 7 | 34,184,882 |
| 2171 | EEPD1 | 7 | 36,280,985 | 2172 | EEPD1 | 7 | 36,306,659 |
| 2173 | VPS41 | 7 | 38,745,317 | 2174 | VPS41 | 7 | 38,758,751 |
| 2175 | VPS41 | 7 | 38,759,185 | 2176 | VPS41 | 7 | 38,768,570 |
| 2177 | VPS41 | 7 | 38,768,817 | 2178 | VPS41 | 7 | 38,812,386 |
| 2179 | VPS41 | 7 | 38,855,826 | 2180 | VPS41 | 7 | 38,866,716 |
| 2181 | VPS41 | 7 | 38,936,691 | 2182 | CDC2L5 | 7 | 39,994,009 |
| 2183 | CDC2L5 | 7 | 40,051,522 | 2184 | CDC2L5 | 7 | 40,056,457 |
| 2185 | CDC2L5 | 7 | 40,063,896 | 2186 | CDC2L5 | 7 | 40,067,860 |
| 2187 | CDC2L5 | 7 | 40,083,623 | 2188 | CDC2L5 | 7 | 40,124,213 |
| 2189 | IGFBP3 | 7 | 45,916,971 | 2190 | ABCA13 | 7 | 48,253,360 |
| 2191 | ABCA13 | 7 | 48,256,966 | 2192 | ABCA13 | 7 | 48,351,224 |
| 2193 | ABCA13 | 7 | 48,388,584 | 2194 | ABCA13 | 7 | 48,399,261 |
| 2195 | ABCA13 | 7 | 48,415,696 | 2196 | ABCA13 | 7 | 48,420,703 |
| 2197 | ABCA13 | 7 | 48,424,446 | 2198 | ABCA13 | 7 | 48,425,312 |
| 2199 | ABCA13 | 7 | 48,427,057 | 2200 | ABCA13 | 7 | 48,471,003 |
| 2201 | ABCA13 | 7 | 48,472,098 | 2202 | ABCA13 | 7 | 48,477,112 |
| 2203 | ABCA13 | 7 | 48,516,335 | 2204 | ABCA13 | 7 | 48,521,048 |
| 2205 | ABCA13 | 7 | 48,537,470 | 2206 | ABCA13 | 7 | 48,537,723 |
| 2207 | ABCA13 | 7 | 48,538,115 | 2208 | ABCA13 | 7 | 48,549,904 |
| 2209 | ABCA13 | 7 | 48,553,490 | 2210 | ABCA13 | 7 | 48,557,231 |
| 2211 | ABCA13 | 7 | 48,622,770 | 2212 | ABCA13 | 7 | 48,656,578 |
| 2213 | ABCA13 | 7 | 48,707,129 | 2214 | ABCA13 | 7 | 48,714,222 |
| 2215 | GRB10 | 7 | 50,707,082 | 2216 | GRB10 | 7 | 50,738,123 |
| 2217 | GRB10 | 7 | 50,745,597 | 2218 | GRB10 | 7 | 50,751,377 |
| 2219 | GRB10 | 7 | 50,752,942 | 2220 | GRB10 | 7 | 50,767,383 |
| 2221 | GRB10 | 7 | 50,790,805 | 2222 | GRB10 | 7 | 50,791,895 |
| 2223 | GRB10 | 7 | 50,797,467 | 2224 | GRB10 | 7 | 50,814,098 |
| 2225 | GRB10 | 7 | 50,839,403 | 2226 | GRB10 | 7 | 50,878,465 |
| 2227 | WBSCR17 | 7 | 69,708,664 | 2228 | WBSCR17 | 7 | 69,982,663 |
| 2229 | WBSCR17 | 7 | 70,003,525 | 2230 | WBSCR17 | 7 | 70,008,405 |
| 2231 | WBSCR17 | 7 | 70,009,819 | 2232 | WBSCR17 | 7 | 70,020,032 |
| 2233 | WBSCR17 | 7 | 70,196,421 | 2234 | WBSCR17 | 7 | 70,318,305 |
| 2235 | WBSCR17 | 7 | 70,327,601 | 2236 | WBSCR17 | 7 | 70,328,803 |
| 2237 | WBSCR17 | 7 | 70,438,836 | 2238 | WBSCR17 | 7 | 70,486,737 |
| 2239 | WBSCR17 | 7 | 70,508,901 | 2240 | WBSCR17 | 7 | 70,527,975 |
| 2241 | WBSCR17 | 7 | 70,537,333 | 2242 | WBSCR17 | 7 | 70,542,497 |
| 2243 | WBSCR17 | 7 | 70,553,758 | 2244 | WBSCR17 | 7 | 70,605,584 |
| 2245 | WBSCR17 | 7 | 70,610,898 | 2246 | WBSCR17 | 7 | 70,622,039 |
| 2247 | WBSCR17 | 7 | 70,661,813 | 2248 | WBSCR17 | 7 | 70,677,555 |
| 2249 | LIMK1 | 7 | 73,143,124 | 2250 | LIMK1 | 7 | 73,155,050 |
| 2251 | GTF2IRD1 | 7 | 73,536,522 | 2252 | GTF2IRD1 | 7 | 73,552,324 |
| 2253 | GTF2IRD1 | 7 | 73,739,845 | 2254 | HIP1 | 7 | 74,641,558 |
| 2255 | HIP1 | 7 | 75,014,321 | 2256 | HIP1 | 7 | 75,071,583 |
| 2257 | HIP1 | 7 | 75,093,684 | 2258 | HIP1 | 7 | 75,125,346 |
| 2259 | HIP1 | 7 | 75,132,211 | 2260 | HIP1 | 7 | 75,134,148 |
| 2261 | HIP1 | 7 | 75,137,795 | 2262 | HIP1 | 7 | 75,146,409 |
| 2263 | HIP1 | 7 | 75,149,973 | 2264 | HIP1 | 7 | 75,186,242 |
| 2265 | HIP1 | 7 | 75,198,775 | 2266 | MAGI2 | 7 | 77,062,170 |
| 2267 | MAGI2 | 7 | 77,491,345 | 2268 | MAGI2 | 7 | 77,497,177 |
| 2269 | MAGI2 | 7 | 77,562,324 | 2270 | MAGI2 | 7 | 77,596,871 |
| 2271 | MAGI2 | 7 | 77,707,944 | 2272 | MAGI2 | 7 | 77,807,229 |
| 2273 | MAGI2 | 7 | 77,811,392 | 2274 | MAGI2 | 7 | 77,818,446 |
| 2275 | MAGI2 | 7 | 78,085,231 | 2276 | MAGI2 | 7 | 78,087,129 |
| 2277 | MAGI2 | 7 | 78,091,049 | 2278 | MAGI2 | 7 | 78,305,682 |
| 2279 | MAGI2 | 7 | 78,331,358 | 2280 | MAGI2 | 7 | 78,350,745 |
| 2281 | MAGI2 | 7 | 78,378,995 | 2282 | MAGI2 | 7 | 78,393,425 |
| 2283 | MAGI2 | 7 | 78,548,747 | 2284 | MAGI2 | 7 | 78,554,879 |
| 2285 | MAGI2 | 7 | 78,581,862 | 2286 | MAGI2 | 7 | 78,589,166 |
| 2287 | MAGI2 | 7 | 78,621,037 | 2288 | MAGI2 | 7 | 78,634,193 |
| 2289 | MAGI2 | 7 | 78,639,527 | 2290 | MAGI2 | 7 | 78,753,565 |
| 2291 | MAGI2 | 7 | 78,760,470 | 2292 | MAGI2 | 7 | 78,779,395 |
| 2293 | MAGI2 | 7 | 78,817,132 | 2294 | MAGI2 | 7 | 78,829,240 |
| 2295 | MAGI2 | 7 | 78,847,570 | 2296 | MAGI2 | 7 | 78,865,894 |
| 2297 | MAGI2 | 7 | 78,867,313 | 2298 | MAGI2 | 7 | 78,872,510 |
| 2299 | MAGI2 | 7 | 78,884,537 | 2300 | MAGI2 | 7 | 78,894,096 |
| 2301 | MAGI2 | 7 | 78,902,124 | 2302 | GNAI1 | 7 | 79,129,442 |
| 2303 | CACNA2D1 | 7 | 81,000,419 | 2304 | CACNA2D1 | 7 | 81,262,844 |
| 2305 | CACNA2D1 | 7 | 81,397,331 | 2306 | CACNA2D1 | 7 | 81,409,867 |
| 2307 | CACNA2D1 | 7 | 81,410,981 | 2308 | CACNA2D1 | 7 | 81,501,211 |
| 2309 | CACNA2D1 | 7 | 81,551,628 | 2310 | PCLO | 7 | 81,734,489 |
| 2311 | PCLO | 7 | 81,754,524 | 2312 | CACNA2D1 | 7 | 81,819,131 |
| 2313 | CACNA2D1 | 7 | 81,829,947 | 2314 | CACNA2D1 | 7 | 81,842,488 |
| 2315 | CACNA2D1 | 7 | 81,846,503 | 2316 | PCLO | 7 | 81,895,238 |
| 2317 | CACNA2D1 | 7 | 81,925,395 | 2318 | PCLO | 7 | 81,935,063 |
| 2319 | PCLO | 7 | 81,953,190 | 2320 | PCLO | 7 | 82,252,869 |
| 2321 | PCLO | 7 | 82,287,971 | 2322 | PCLO | 7 | 82,291,644 |
| 2323 | PCLO | 7 | 82,292,608 | 2324 | PCLO | 7 | 82,317,658 |
| 2325 | PCLO | 7 | 82,341,345 | 2326 | PCLO | 7 | 82,341,378 |
| 2327 | PCLO | 7 | 82,358,102 | 2328 | PCLO | 7 | 82,391,885 |
| 2329 | PCLO | 7 | 82,401,452 | 2330 | PCLO | 7 | 82,419,795 |
| 2331 | PCLO | 7 | 82,454,771 | 2332 | PCLO | 7 | 82,581,867 |
| 2333 | PCLO | 7 | 82,636,908 | 2334 | PCLO | 7 | 82,659,120 |
| 2335 | SEMA3E | 7 | 82,881,204 | 2336 | SEMA3E | 7 | 82,882,893 |
| 2337 | SEMA3E | 7 | 82,883,620 | 2338 | SEMA3E | 7 | 82,895,964 |
| 2339 | SEMA3E | 7 | 82,913,893 | 2340 | SEMA3E | 7 | 82,935,623 |
| 2341 | SEMA3E | 7 | 82,946,973 | 2342 | SEMA3E | 7 | 82,970,533 |
| 2343 | SEMA3E | 7 | 83,029,806 | 2344 | SEMA3E | 7 | 83,047,248 |
| 2345 | SEMA3E | 7 | 83,061,152 | 2346 | SEMA3E | 7 | 83,125,543 |
| 2347 | SEMA3A | 7 | 83,697,056 | 2348 | ABCB4 | 7 | 86,372,139 |
| 2349 | ABCB4 | 7 | 86,868,839 | 2350 | ABCB4 | 7 | 86,877,077 |
| 2351 | ABCB4 | 7 | 86,883,520 | 2352 | ABCB4 | 7 | 86,892,183 |
| 2353 | ABCB4 | 7 | 86,897,339 | 2354 | ABCB4 | 7 | 86,941,606 |
| 2355 | ADAM22 | 7 | 87,441,679 | 2356 | ADAM22 | 7 | 87,471,187 |
| 2357 | ADAM22 | 7 | 87,471,440 | 2358 | ADAM22 | 7 | 87,554,236 |
| 2359 | ADAM22 | 7 | 87,557,024 | 2360 | ADAM22 | 7 | 87,579,450 |
| 2361 | ADAM22 | 7 | 87,606,110 | 2362 | GTPBP10 | 7 | 89,357,529 |
| 2363 | GTPBP10 | 7 | 89,852,344 | 2364 | GTPBP10 | 7 | 89,857,773 |
| 2365 | PPP1R9A | 7 | 94,064,776 | 2366 | PON1 | 7 | 94,266,443 |
| 2367 | PPP1R9A | 7 | 94,453,195 | 2368 | PPP1R9A | 7 | 94,534,075 |
| 2369 | PPP1R9A | 7 | 94,569,490 | 2370 | PPP1R9A | 7 | 94,607,167 |
| 2371 | PPP1R9A | 7 | 94,632,721 | 2372 | PPP1R9A | 7 | 94,632,764 |
| 2373 | PPP1R9A | 7 | 94,681,040 | 2374 | PPP1R9A | 7 | 94,681,285 |
| 2375 | PPP1R9A | 7 | 94,717,161 | 2376 | PPP1R9A | 7 | 94,733,892 |
| 2377 | PPP1R9A | 7 | 94,746,827 | 2378 | PPP1R9A | 7 | 94,747,598 |
| 2379 | DYNC1I1 | 7 | 94,748,308 | 2380 | PPP1R9A | 7 | 94,759,427 |
| 2381 | PON1 | 7 | 94,775,829 | 2382 | PON1 | 7 | 94,776,193 |
| 2383 | PON1 | 7 | 94,780,701 | 2384 | DYNC1I1 | 7 | 94,786,218 |
| 2385 | PON1 | 7 | 94,804,103 | 2386 | DYNC1I1 | 7 | 95,242,508 |
| 2387 | DYNC1I1 | 7 | 95,242,854 | 2388 | DYNC1I1 | 7 | 95,242,972 |
| 2389 | DYNC1I1 | 7 | 95,325,994 | 2390 | DYNC1I1 | 7 | 95,369,751 |
| 2391 | DYNC1I1 | 7 | 95,384,186 | 2392 | DYNC1I1 | 7 | 95,451,958 |
| 2393 | DYNC1I1 | 7 | 95,452,403 | 2394 | DYNC1I1 | 7 | 95,503,995 |
| 2395 | DYNC1I1 | 7 | 95,548,598 | 2396 | DYNC1I1 | 7 | 95,556,260 |
| 2397 | DYNC1I1 | 7 | 95,581,854 | 2398 | ZNF3 | 7 | 99,024,937 |
| 2399 | ZNF3 | 7 | 99,480,681 | 2400 | CUX1 | 7 | 100,785,884 |
| 2401 | EMID2 | 7 | 100,787,736 | 2402 | EMID2 | 7 | 100,828,478 |
| 2403 | CUX1 | 7 | 100,962,370 | 2404 | CUX1 | 7 | 101,306,594 |
| 2405 | CUX1 | 7 | 101,391,246 | 2406 | CUX1 | 7 | 101,533,073 |
| 2407 | CUX1 | 7 | 101,612,087 | 2408 | CUX1 | 7 | 101,694,544 |
| 2409 | CUX1 | 7 | 101,704,241 | 2410 | CUX1 | 7 | 101,704,367 |
| 2411 | KCND2 | 7 | 119,301,300 | 2412 | KCND2 | 7 | 119,564,389 |
| 2413 | KCND2 | 7 | 120,060,200 | 2414 | KCND2 | 7 | 120,110,963 |
| 2415 | KCND2 | 7 | 120,117,902 | 2416 | KCND2 | 7 | 120,130,284 |
| 2417 | KCND2 | 7 | 120,197,437 | 2418 | KCND2 | 7 | 120,197,820 |
| 2419 | CADPS2 | 7 | 121,805,395 | 2420 | CADPS2 | 7 | 121,865,650 |
| 2421 | CADPS2 | 7 | 122,066,038 | 2422 | CADPS2 | 7 | 122,074,175 |
| 2423 | CADPS2 | 7 | 122,146,928 | 2424 | CADPS2 | 7 | 122,329,673 |
| 2425 | CADPS2 | 7 | 122,329,881 | 2426 | SLC13A1 | 7 | 122,523,202 |
| 2427 | SLC13A1 | 7 | 122,572,907 | 2428 | SLC13A1 | 7 | 122,585,872 |
| 2429 | SLC13A1 | 7 | 122,587,919 | 2430 | SLC13A1 | 7 | 122,596,470 |
| 2431 | SLC13A1 | 7 | 122,613,192 | 2432 | SLC13A1 | 7 | 122,631,110 |
| 2433 | GRM8 | 7 | 125,769,933 | 2434 | GRM8 | 7 | 125,816,605 |
| 2435 | GRM8 | 7 | 125,837,771 | 2436 | GRM8 | 7 | 125,855,816 |
| 2437 | GRM8 | 7 | 125,871,585 | 2438 | GRM8 | 7 | 125,879,584 |
| 2439 | GRM8 | 7 | 125,888,362 | 2440 | GRM8 | 7 | 126,095,504 |
| 2441 | GRM8 | 7 | 126,114,635 | 2442 | GRM8 | 7 | 126,156,034 |
| 2443 | GRM8 | 7 | 126,159,625 | 2444 | GRM8 | 7 | 126,163,369 |
| 2445 | GRM8 | 7 | 126,167,389 | 2446 | GRM8 | 7 | 126,170,542 |
| 2447 | GRM8 | 7 | 126,216,753 | 2448 | GRM8 | 7 | 126,295,139 |
| 2449 | GRM8 | 7 | 126,299,256 | 2450 | GRM8 | 7 | 126,521,407 |
| 2451 | GRM8 | 7 | 126,552,824 | 2452 | GRM8 | 7 | 126,623,193 |
| 2453 | EXOC4 | 7 | 132,456,559 | 2454 | EXOC4 | 7 | 132,476,956 |
| 2455 | EXOC4 | 7 | 132,754,129 | 2456 | EXOC4 | 7 | 132,754,657 |
| 2457 | EXOC4 | 7 | 132,781,480 | 2458 | EXOC4 | 7 | 132,788,184 |
| 2459 | EXOC4 | 7 | 132,789,020 | 2460 | EXOC4 | 7 | 132,797,614 |
| 2461 | EXOC4 | 7 | 132,917,865 | 2462 | EXOC4 | 7 | 132,953,563 |
| 2463 | EXOC4 | 7 | 132,991,170 | 2464 | EXOC4 | 7 | 132,996,175 |
| 2465 | EXOC4 | 7 | 133,002,858 | 2466 | EXOC4 | 7 | 133,045,046 |
| 2467 | EXOC4 | 7 | 133,081,578 | 2468 | EXOC4 | 7 | 133,240,386 |
| 2469 | EXOC4 | 7 | 133,241,477 | 2470 | EXOC4 | 7 | 133,246,042 |
| 2471 | EXOC4 | 7 | 133,352,637 | 2472 | EXOC4 | 7 | 133,378,037 |
| 2473 | DGKI | 7 | 136,578,863 | 2474 | DGKI | 7 | 136,726,387 |
| 2475 | DGKI | 7 | 136,730,489 | 2476 | DGKI | 7 | 136,757,487 |
| 2477 | DGKI | 7 | 136,769,909 | 2478 | DGKI | 7 | 136,770,651 |
| 2479 | DGKI | 7 | 136,772,491 | 2480 | DGKI | 7 | 136,782,783 |
| 2481 | CREB3L2 | 7 | 137,343,428 | 2482 | TBXAS1 | 7 | 138,950,079 |
| 2483 | TBXAS1 | 7 | 139,135,304 | 2484 | TBXAS1 | 7 | 139,225,646 |
| 2485 | TBXAS1 | 7 | 139,311,144 | 2486 | CNTNAP2 | 7 | 145,425,744 |
| 2487 | CNTNAP2 | 7 | 145,431,076 | 2488 | CNTNAP2 | 7 | 145,485,790 |
| 2489 | CNTNAP2 | 7 | 145,686,573 | 2490 | CNTNAP2 | 7 | 145,710,838 |
| 2491 | CNTNAP2 | 7 | 145,724,542 | 2492 | CNTNAP2 | 7 | 145,743,361 |
| 2493 | CNTNAP2 | 7 | 145,865,999 | 2494 | CNTNAP2 | 7 | 145,906,353 |
| 2495 | CNTNAP2 | 7 | 146,204,639 | 2496 | CNTNAP2 | 7 | 146,414,565 |
| 2497 | CNTNAP2 | 7 | 146,671,711 | 2498 | CNTNAP2 | 7 | 146,671,930 |
| 2499 | CNTNAP2 | 7 | 146,689,924 | 2500 | CNTNAP2 | 7 | 146,724,262 |
| 2501 | CNTNAP2 | 7 | 146,762,507 | 2502 | CNTNAP2 | 7 | 146,788,354 |
| 2503 | CNTNAP2 | 7 | 146,795,593 | 2504 | CNTNAP2 | 7 | 146,800,067 |
| 2505 | CNTNAP2 | 7 | 146,816,270 | 2506 | CNTNAP2 | 7 | 146,816,456 |
| 2507 | CNTNAP2 | 7 | 147,669,284 | 2508 | CNTNAP2 | 7 | 147,695,819 |
| 2509 | CNTNAP2 | 7 | 147,712,266 | 2510 | CNTNAP2 | 7 | 147,748,438 |
| 2511 | CNTNAP2 | 7 | 147,749,182 | 2512 | PTPRN2 | 7 | 156,566,641 |
| 2513 | PTPRN2 | 7 | 156,598,397 | 2514 | PTPRN2 | 7 | 157,007,427 |
| 2515 | PTPRN2 | 7 | 157,007,523 | 2516 | PTPRN2 | 7 | 157,017,352 |
| 2517 | PTPRN2 | 7 | 157,044,149 | 2518 | PTPRN2 | 7 | 157,149,210 |
| 2519 | PTPRN2 | 7 | 157,175,770 | 2520 | PTPRN2 | 7 | 157,421,786 |
| 2521 | PTPRN2 | 7 | 157,499,807 | 2522 | PTPRN2 | 7 | 157,511,759 |
| 2523 | PTPRN2 | 7 | 157,609,674 | 2524 | PTPRN2 | 7 | 157,619,954 |
| 2525 | PTPRN2 | 7 | 157,621,221 | 2526 | PTPRN2 | 7 | 157,662,662 |
| 2527 | PTPRN2 | 7 | 157,875,149 | 2528 | PTPRN2 | 7 | 157,904,553 |
| 2529 | PTPRN2 | 7 | 157,908,408 | 2530 | PTPRN2 | 7 | 157,919,551 |
| 2531 | PTPRN2 | 7 | 157,920,856 | 2532 | PTPRN2 | 7 | 157,973,350 |
| 2533 | PTPRN2 | 7 | 158,015,477 | 2534 | PTPRN2 | 7 | 158,029,235 |
| 2535 | PTPRN2 | 7 | 158,077,879 | 2536 | CSMD1 | 8 | 2,819,792 |
| 2537 | CSMD1 | 8 | 2,849,233 | 2538 | CSMD1 | 8 | 2,958,438 |
| 2539 | CSMD1 | 8 | 3,207,377 | 2540 | CSMD1 | 8 | 3,209,023 |
| 2541 | CSMD1 | 8 | 3,209,202 | 2542 | CSMD1 | 8 | 3,211,642 |
| 2543 | CSMD1 | 8 | 3,213,631 | 2544 | CSMD1 | 8 | 3,216,613 |
| 2545 | CSMD1 | 8 | 3,230,805 | 2546 | CSMD1 | 8 | 3,232,022 |
| 2547 | CSMD1 | 8 | 3,232,222 | 2548 | CSMD1 | 8 | 3,250,935 |
| 2549 | CSMD1 | 8 | 3,275,090 | 2550 | CSMD1 | 8 | 3,340,467 |
| 2551 | MCPH1 | 8 | 6,266,787 | 2552 | MCPH1 | 8 | 6,282,480 |
| 2553 | MCPH1 | 8 | 6,288,880 | 2554 | MCPH1 | 8 | 6,289,562 |
| 2555 | MCPH1 | 8 | 6,290,919 | 2556 | MCPH1 | 8 | 6,298,146 |
| 2557 | MCPH1 | 8 | 6,306,930 | 2558 | MCPH1 | 8 | 6,307,055 |
| 2559 | MCPH1 | 8 | 6,307,171 | 2560 | MCPH1 | 8 | 6,314,156 |
| 2561 | MCPH1 | 8 | 6,314,682 | 2562 | MCPH1 | 8 | 6,316,969 |
| 2563 | MCPH1 | 8 | 6,357,338 | 2564 | MCPH1 | 8 | 6,362,452 |
| 2565 | MCPH1 | 8 | 6,373,849 | 2566 | MCPH1 | 8 | 6,379,955 |
| 2567 | MCPH1 | 8 | 6,407,942 | 2568 | MCPH1 | 8 | 6,461,123 |
| 2569 | MCPH1 | 8 | 6,461,154 | 2570 | MCPH1 | 8 | 6,461,166 |
| 2571 | MCPH1 | 8 | 6,466,450 | 2572 | MCPH1 | 8 | 6,475,913 |
| 2573 | MCPH1 | 8 | 6,475,985 | 2574 | MCPH1 | 8 | 6,509,698 |
| 2575 | DLC1 | 8 | 13,006,870 | 2576 | DLC1 | 8 | 13,013,028 |
| 2577 | DLC1 | 8 | 13,014,125 | 2578 | DLC1 | 8 | 13,016,678 |
| 2579 | SGCZ | 8 | 13,962,387 | 2580 | SGCZ | 8 | 14,242,631 |
| 2581 | SGCZ | 8 | 14,247,697 | 2582 | SGCZ | 8 | 14,292,030 |
| 2583 | SGCZ | 8 | 14,303,019 | 2584 | SGCZ | 8 | 14,313,399 |
| 2585 | SGCZ | 8 | 14,316,760 | 2586 | SGCZ | 8 | 14,330,923 |
| 2587 | SGCZ | 8 | 14,351,624 | 2588 | SGCZ | 8 | 14,357,736 |
| 2589 | SGCZ | 8 | 14,362,495 | 2590 | SGCZ | 8 | 14,390,316 |
| 2591 | SGCZ | 8 | 14,390,686 | 2592 | SGCZ | 8 | 14,420,466 |
| 2593 | SGCZ | 8 | 14,594,583 | 2594 | SGCZ | 8 | 14,623,703 |
| 2595 | SGCZ | 8 | 14,915,797 | 2596 | SGCZ | 8 | 15,179,623 |
| 2597 | SLC7A2 | 8 | 17,436,984 | 2598 | SLC7A2 | 8 | 17,454,671 |
| 2599 | SLC7A2 | 8 | 17,460,770 | 2600 | SLC7A2 | 8 | 17,471,816 |
| 2601 | SLC7A2 | 8 | 17,472,551 | 2602 | PSD3 | 8 | 18,428,754 |
| 2603 | PSD3 | 8 | 18,431,654 | 2604 | PSD3 | 8 | 18,529,675 |
| 2605 | PSD3 | 8 | 18,559,152 | 2606 | PSD3 | 8 | 18,560,182 |
| 2607 | PSD3 | 8 | 18,709,420 | 2608 | PSD3 | 8 | 18,734,189 |
| 2609 | PSD3 | 8 | 18,737,733 | 2610 | PSD3 | 8 | 18,737,939 |
| 2611 | PSD3 | 8 | 18,757,428 | 2612 | PSD3 | 8 | 18,765,584 |
| 2613 | PSD3 | 8 | 18,772,229 | 2614 | PSD3 | 8 | 18,819,182 |
| 2615 | PSD3 | 8 | 18,953,685 | 2616 | ATP6V1B2 | 8 | 20,124,602 |
| 2617 | ATP6V1B2 | 8 | 20,137,423 | 2618 | GFRA2 | 8 | 21,554,368 |
| 2619 | GFRA2 | 8 | 21,642,357 | 2620 | XPO7 | 8 | 21,886,104 |
| 2621 | XPO7 | 8 | 21,892,330 | 2622 | XPO7 | 8 | 21,901,374 |
| 2623 | XPO7 | 8 | 21,916,371 | 2624 | XPO7 | 8 | 21,924,970 |
| 2625 | PPP3CC | 8 | 22,380,522 | 2626 | PEBP4 | 8 | 22,632,507 |
| 2627 | PEBP4 | 8 | 22,634,532 | 2628 | PEBP4 | 8 | 22,648,953 |
| 2629 | PEBP4 | 8 | 22,828,329 | 2630 | PEBP4 | 8 | 22,842,095 |
| 2631 | ENTPD4 | 8 | 23,415,906 | 2632 | SLC25A37 | 8 | 23,453,211 |
| 2633 | SLC25A37 | 8 | 23,454,180 | 2634 | SLC25A37 | 8 | 23,471,600 |
| 2635 | SLC25A37 | 8 | 23,490,677 | 2636 | UNC5D | 8 | 35,516,694 |
| 2637 | UNC5D | 8 | 35,526,631 | 2638 | UNC5D | 8 | 35,529,087 |
| 2639 | UNC5D | 8 | 35,531,300 | 2640 | UNC5D | 8 | 35,544,036 |
| 2641 | UNC5D | 8 | 35,574,119 | 2642 | UNC5D | 8 | 35,586,829 |
| 2643 | UNC5D | 8 | 35,752,828 | 2644 | UNC5D | 8 | 36,047,709 |
| 2645 | SFRP1 | 8 | 41,244,318 | 2646 | SFRP1 | 8 | 41,254,926 |
| 2647 | SFRP1 | 8 | 41,256,599 | 2648 | SFRP1 | 8 | 41,262,183 |
| 2649 | SFRP1 | 8 | 41,276,396 | 2650 | PRKDC | 8 | 49,008,811 |
| 2651 | SNTG1 | 8 | 50,996,988 | 2652 | SNTG1 | 8 | 51,028,383 |
| 2653 | SNTG1 | 8 | 51,082,766 | 2654 | SNTG1 | 8 | 51,106,589 |
| 2655 | SNTG1 | 8 | 51,127,991 | 2656 | SNTG1 | 8 | 51,142,873 |
| 2657 | SNTG1 | 8 | 51,234,566 | 2658 | SNTG1 | 8 | 51,276,836 |
| 2659 | SNTG1 | 8 | 51,289,749 | 2660 | SNTG1 | 8 | 51,320,466 |
| 2661 | SNTG1 | 8 | 51,329,479 | 2662 | SNTG1 | 8 | 51,333,190 |
| 2663 | SNTG1 | 8 | 51,557,371 | 2664 | SNTG1 | 8 | 51,603,877 |
| 2665 | SNTG1 | 8 | 51,605,982 | 2666 | SNTG1 | 8 | 51,616,502 |
| 2667 | SNTG1 | 8 | 51,620,897 | 2668 | SNTG1 | 8 | 51,624,716 |
| 2669 | SNTG1 | 8 | 51,624,769 | 2670 | SNTG1 | 8 | 51,859,715 |
| 2671 | SNTG1 | 8 | 51,888,421 | 2672 | SNTG1 | 8 | 51,900,540 |
| 2673 | LYN | 8 | 56,987,448 | 2674 | LYN | 8 | 57,034,636 |
| 2675 | LYN | 8 | 57,039,314 | 2676 | LYN | 8 | 57,053,118 |
| 2677 | LYN | 8 | 57,054,784 | 2678 | LYN | 8 | 57,107,537 |
| 2679 | LYN | 8 | 57,108,529 | 2680 | LYN | 8 | 57,108,914 |
| 2681 | LYN | 8 | 57,110,114 | 2682 | PLAG1 | 8 | 57,263,345 |
| 2683 | TOX | 8 | 59,972,394 | 2684 | TOX | 8 | 59,980,027 |
| 2685 | TOX | 8 | 60,043,593 | 2686 | NKAIN3 | 8 | 63,450,713 |
| 2687 | NKAIN3 | 8 | 63,461,008 | 2688 | NKAIN3 | 8 | 63,496,176 |
| 2689 | NKAIN3 | 8 | 63,498,893 | 2690 | NKAIN3 | 8 | 63,502,193 |
| 2691 | NKAIN3 | 8 | 63,552,090 | 2692 | NKAIN3 | 8 | 63,555,581 |
| 2693 | NKAIN3 | 8 | 63,557,252 | 2694 | NKAIN3 | 8 | 63,608,657 |
| 2695 | NKAIN3 | 8 | 63,649,765 | 2696 | NKAIN3 | 8 | 63,651,711 |
| 2697 | NKAIN3 | 8 | 63,659,439 | 2698 | NKAIN3 | 8 | 63,662,642 |
| 2699 | NKAIN3 | 8 | 63,670,367 | 2700 | NKAIN3 | 8 | 63,692,734 |
| 2701 | NKAIN3 | 8 | 63,693,165 | 2702 | NKAIN3 | 8 | 63,711,876 |
| 2703 | NKAIN3 | 8 | 63,750,511 | 2704 | NKAIN3 | 8 | 63,781,261 |
| 2705 | NKAIN3 | 8 | 63,821,921 | 2706 | NKAIN3 | 8 | 63,822,189 |
| 2707 | NKAIN3 | 8 | 63,825,859 | 2708 | NKAIN3 | 8 | 63,862,125 |
| 2709 | NKAIN3 | 8 | 63,868,884 | 2710 | NKAIN3 | 8 | 63,897,057 |
| 2711 | NKAIN3 | 8 | 63,900,353 | 2712 | NKAIN3 | 8 | 63,930,295 |
| 2713 | NKAIN3 | 8 | 63,935,531 | 2714 | NKAIN3 | 8 | 63,936,341 |
| 2715 | NKAIN3 | 8 | 63,989,029 | 2716 | NKAIN3 | 8 | 63,994,228 |
| 2717 | NKAIN3 | 8 | 64,008,938 | 2718 | NKAIN3 | 8 | 64,011,110 |
| 2719 | NKAIN3 | 8 | 64,020,373 | 2720 | NKAIN3 | 8 | 64,030,047 |
| 2721 | NKAIN3 | 8 | 64,033,505 | 2722 | NKAIN3 | 8 | 64,056,708 |
| 2723 | NKAIN3 | 8 | 64,068,304 | 2724 | NKAIN3 | 8 | 64,084,956 |
| 2725 | DEPDC2 | 8 | 69,043,977 | 2726 | DEPDC2 | 8 | 69,121,712 |
| 2727 | DEPDC2 | 8 | 69,176,372 | 2728 | DEPDC2 | 8 | 69,176,632 |
| 2729 | DEPDC2 | 8 | 69,207,400 | 2730 | DEPDC2 | 8 | 69,208,963 |
| 2731 | DEPDC2 | 8 | 69,209,296 | 2732 | DEPDC2 | 8 | 69,269,021 |
| 2733 | DEPDC2 | 8 | 69,308,908 | 2734 | DEPDC2 | 8 | 69,314,054 |
| 2735 | KCNB2 | 8 | 73,601,624 | 2736 | KCNB2 | 8 | 73,614,029 |
| 2737 | KCNB2 | 8 | 73,618,324 | 2738 | KCNB2 | 8 | 73,628,966 |
| 2739 | KCNB2 | 8 | 73,638,413 | 2740 | KCNB2 | 8 | 73,651,827 |
| 2741 | KCNB2 | 8 | 73,740,108 | 2742 | KCNB2 | 8 | 73,742,670 |
| 2743 | KCNB2 | 8 | 73,754,776 | 2744 | KCNB2 | 8 | 73,762,984 |
| 2745 | KCNB2 | 8 | 73,776,211 | 2746 | KCNB2 | 8 | 73,780,051 |
| 2747 | KCNB2 | 8 | 73,780,154 | 2748 | KCNB2 | 8 | 73,798,241 |
| 2749 | KCNB2 | 8 | 73,818,016 | 2750 | KCNB2 | 8 | 73,821,159 |
| 2751 | KCNB2 | 8 | 73,901,806 | 2752 | KCNB2 | 8 | 73,975,854 |
| 2753 | KCNB2 | 8 | 74,014,801 | 2754 | KCNB2 | 8 | 74,026,549 |
| 2755 | CRISPLD1 | 8 | 76,072,659 | 2756 | CRISPLD1 | 8 | 76,086,655 |
| 2757 | CRISPLD1 | 8 | 76,103,499 | 2758 | CRISPLD1 | 8 | 76,109,250 |
| 2759 | CRISPLD1 | 8 | 76,158,048 | 2760 | CRISPLD1 | 8 | 76,167,652 |
| 2761 | MMP16 | 8 | 89,112,004 | 2762 | MMP16 | 8 | 89,163,898 |
| 2763 | MMP16 | 8 | 89,276,696 | 2764 | MMP16 | 8 | 89,337,659 |
| 2765 | MMP16 | 8 | 89,358,861 | 2766 | MMP16 | 8 | 89,399,547 |
| 2767 | MMP16 | 8 | 89,413,738 | 2768 | MMP16 | 8 | 89,414,303 |
| 2769 | MMP16 | 8 | 89,421,430 | 2770 | GRHL2 | 8 | 102,613,455 |
| 2771 | GRHL2 | 8 | 102,617,910 | 2772 | GRHL2 | 8 | 102,618,040 |
| 2773 | GRHL2 | 8 | 102,690,095 | 2774 | GRHL2 | 8 | 102,697,131 |
| 2775 | GRHL2 | 8 | 102,718,857 | 2776 | GRHL2 | 8 | 102,740,588 |
| 2777 | GRHL2 | 8 | 102,746,981 | 2778 | GRHL2 | 8 | 102,759,164 |
| 2779 | GRHL2 | 8 | 102,769,504 | 2780 | NCALD | 8 | 102,777,547 |
| 2781 | NCALD | 8 | 102,812,988 | 2782 | NCALD | 8 | 102,868,670 |
| 2783 | NCALD | 8 | 102,903,699 | 2784 | NCALD | 8 | 102,907,196 |
| 2785 | BAALC | 8 | 104,238,041 | 2786 | BAALC | 8 | 104,265,315 |
| 2787 | BAALC | 8 | 104,271,601 | 2788 | BAALC | 8 | 104,319,015 |
| 2789 | BAALC | 8 | 104,325,901 | 2790 | ZFPM2 | 8 | 106,413,317 |
| 2791 | ZFPM2 | 8 | 106,488,930 | 2792 | ZFPM2 | 8 | 106,504,399 |
| 2793 | ZFPM2 | 8 | 106,505,157 | 2794 | ZFPM2 | 8 | 106,507,154 |
| 2795 | ZFPM2 | 8 | 106,507,756 | 2796 | ZFPM2 | 8 | 106,530,047 |
| 2797 | ZFPM2 | 8 | 106,794,362 | 2798 | ZFPM2 | 8 | 106,800,179 |
| 2799 | ZFPM2 | 8 | 106,801,553 | 2800 | ZFPM2 | 8 | 106,824,935 |
| 2801 | ZFPM2 | 8 | 106,828,892 | 2802 | ZFPM2 | 8 | 106,847,240 |
| 2803 | ZFPM2 | 8 | 106,864,559 | 2804 | ZFPM2 | 8 | 106,880,858 |
| 2805 | ZFPM2 | 8 | 106,880,874 | 2806 | ZFPM2 | 8 | 106,888,057 |
| 2807 | ZFPM2 | 8 | 106,910,116 | 2808 | ZFPM2 | 8 | 106,922,815 |
| 2809 | CSMD3 | 8 | 113,479,682 | 2810 | CSMD3 | 8 | 113,505,578 |
| 2811 | CSMD3 | 8 | 114,209,523 | 2812 | CSMD3 | 8 | 114,259,566 |
| 2813 | CSMD3 | 8 | 114,319,937 | 2814 | CSMD3 | 8 | 114,458,866 |
| 2815 | CSMD3 | 8 | 114,475,512 | 2816 | CSMD3 | 8 | 114,519,694 |
| 2817 | CSMD3 | 8 | 114,552,699 | 2818 | SAMD12 | 8 | 119,448,826 |
| 2819 | SAMD12 | 8 | 119,531,636 | 2820 | SAMD12 | 8 | 119,532,372 |
| 2821 | SAMD12 | 8 | 119,532,971 | 2822 | SAMD12 | 8 | 119,536,976 |
| 2823 | SAMD12 | 8 | 119,622,273 | 2824 | SAMD12 | 8 | 119,669,482 |
| 2825 | SAMD12 | 8 | 119,671,788 | 2826 | SAMD12 | 8 | 119,676,462 |
| 2827 | SAMD12 | 8 | 119,719,731 | 2828 | SAMD12 | 8 | 119,740,378 |
| 2829 | SAMD12 | 8 | 119,741,315 | 2830 | FBXO32 | 8 | 124,583,159 |
| 2831 | FBXO32 | 8 | 124,595,944 | 2832 | FER1L6 | 8 | 125,020,334 |
| 2833 | FER1L6 | 8 | 125,032,627 | 2834 | FER1L6 | 8 | 125,053,616 |
| 2835 | FER1L6 | 8 | 125,102,788 | 2836 | FER1L6 | 8 | 125,108,933 |
| 2837 | FER1L6 | 8 | 125,122,813 | 2838 | FER1L6 | 8 | 125,123,546 |
| 2839 | FER1L6 | 8 | 125,142,993 | 2840 | FER1L6 | 8 | 125,144,097 |
| 2841 | FER1L6 | 8 | 125,145,770 | 2842 | FER1L6 | 8 | 125,147,531 |
| 2843 | FER1L6 | 8 | 125,157,817 | 2844 | FER1L6 | 8 | 125,158,437 |
| 2845 | FER1L6 | 8 | 125,171,480 | 2846 | FER1L6 | 8 | 125,186,054 |
| 2847 | FER1L6 | 8 | 125,223,811 | 2848 | MTSS1 | 8 | 125,643,333 |
| 2849 | MTSS1 | 8 | 125,648,174 | 2850 | MTSS1 | 8 | 125,649,171 |
| 2851 | MTSS1 | 8 | 125,651,280 | 2852 | MTSS1 | 8 | 125,669,999 |
| 2853 | MTSS1 | 8 | 125,690,229 | 2854 | MTSS1 | 8 | 125,700,462 |
| 2855 | MTSS1 | 8 | 125,802,301 | 2856 | MTSS1 | 8 | 125,954,015 |
| 2857 | FAM84B | 8 | 127,836,839 | 2858 | DDEF1 | 8 | 131,125,920 |
| 2859 | DDEF1 | 8 | 131,179,288 | 2860 | DDEF1 | 8 | 131,199,776 |
| 2861 | DDEF1 | 8 | 131,225,253 | 2862 | DDEF1 | 8 | 131,236,230 |
| 2863 | DDEF1 | 8 | 131,247,872 | 2864 | DDEF1 | 8 | 131,254,886 |
| 2865 | DDEF1 | 8 | 131,286,874 | 2866 | DDEF1 | 8 | 131,296,201 |
| 2867 | DDEF1 | 8 | 131,325,860 | 2868 | DDEF1 | 8 | 131,350,781 |
| 2869 | DDEF1 | 8 | 131,365,205 | 2870 | DDEF1 | 8 | 131,373,060 |
| 2871 | DDEF1 | 8 | 131,379,036 | 2872 | DDEF1 | 8 | 131,394,209 |
| 2873 | DDEF1 | 8 | 131,406,218 | 2874 | DDEF1 | 8 | 131,407,018 |
| 2875 | DDEF1 | 8 | 131,415,088 | 2876 | DDEF1 | 8 | 131,415,248 |
| 2877 | DDEF1 | 8 | 131,418,292 | 2878 | DDEF1 | 8 | 131,423,273 |
| 2879 | DDEF1 | 8 | 131,436,663 | 2880 | DDEF1 | 8 | 131,465,743 |
| 2881 | DDEF1 | 8 | 131,469,150 | 2882 | DDEF1 | 8 | 131,480,431 |
| 2883 | DDEF1 | 8 | 131,490,170 | 2884 | ADCY8 | 8 | 131,862,883 |
| 2885 | ADCY8 | 8 | 131,872,404 | 2886 | ADCY8 | 8 | 131,876,740 |
| 2887 | ADCY8 | 8 | 131,930,184 | 2888 | ADCY8 | 8 | 131,958,850 |
| 2889 | ADCY8 | 8 | 131,961,234 | 2890 | ADCY8 | 8 | 131,972,316 |
| 2891 | ADCY8 | 8 | 131,983,404 | 2892 | ADCY8 | 8 | 131,985,500 |
| 2893 | ADCY8 | 8 | 131,997,583 | 2894 | ADCY8 | 8 | 132,016,683 |
| 2895 | ADCY8 | 8 | 132,056,557 | 2896 | ADCY8 | 8 | 132,057,791 |
| 2897 | ADCY8 | 8 | 132,070,010 | 2898 | ADCY8 | 8 | 132,071,996 |
| 2899 | ADCY8 | 8 | 132,151,934 | 2900 | KCNQ3 | 8 | 133,208,937 |
| 2901 | KCNQ3 | 8 | 133,575,550 | 2902 | ST3GAL1 | 8 | 134,608,818 |
| 2903 | ST3GAL1 | 8 | 134,609,061 | 2904 | ST3GAL1 | 8 | 134,610,724 |
| 2905 | ST3GAL1 | 8 | 134,664,388 | 2906 | ST3GAL1 | 8 | 134,664,414 |
| 2907 | COL22A1 | 8 | 139,668,834 | 2908 | COL22A1 | 8 | 139,744,740 |
| 2909 | COL22A1 | 8 | 139,763,602 | 2910 | COL22A1 | 8 | 139,770,391 |
| 2911 | COL22A1 | 8 | 139,777,590 | 2912 | COL22A1 | 8 | 139,834,014 |
| 2913 | COL22A1 | 8 | 139,871,695 | 2914 | COL22A1 | 8 | 139,901,545 |
| 2915 | COL22A1 | 8 | 139,976,026 | 2916 | COL22A1 | 8 | 139,980,721 |
| 2917 | COL22A1 | 8 | 139,992,260 | 2918 | COL22A1 | 8 | 139,992,787 |
| 2919 | COL22A1 | 8 | 139,994,229 | 2920 | ZC3H3 | 8 | 144,670,321 |
| 2921 | ZC3H3 | 8 | 144,684,823 | 2922 | SMARCA2 | 9 | 2,053,356 |
| 2923 | SMARCA2 | 9 | 2,083,551 | 2924 | SMARCA2 | 9 | 2,115,231 |
| 2925 | SMARCA2 | 9 | 2,120,828 | 2926 | SMARCA2 | 9 | 2,120,917 |
| 2927 | SMARCA2 | 9 | 2,123,189 | 2928 | SMARCA2 | 9 | 2,147,097 |
| 2929 | SMARCA2 | 9 | 2,163,296 | 2930 | SMARCA2 | 9 | 2,175,324 |
| 2931 | SMARCA2 | 9 | 2,177,750 | 2932 | SMARCA2 | 9 | 2,178,335 |
| 2933 | SMARCA2 | 9 | 2,178,383 | 2934 | SMARCA2 | 9 | 2,181,309 |
| 2935 | SLC1A1 | 9 | 4,550,348 | 2936 | SLC1A1 | 9 | 4,552,472 |
| 2937 | SLC1A1 | 9 | 4,567,130 | 2938 | SLC1A1 | 9 | 4,576,808 |
| 2939 | PTPRD | 9 | 8,283,622 | 2940 | PTPRD | 9 | 8,299,450 |
| 2941 | PTPRD | 9 | 8,365,585 | 2942 | PTPRD | 9 | 8,372,966 |
| 2943 | PTPRD | 9 | 8,389,766 | 2944 | PTPRD | 9 | 8,390,681 |
| 2945 | PTPRD | 9 | 8,393,640 | 2946 | PTPRD | 9 | 8,417,170 |
| 2947 | PTPRD | 9 | 8,418,856 | 2948 | PTPRD | 9 | 8,420,033 |
| 2949 | PTPRD | 9 | 8,420,742 | 2950 | PTPRD | 9 | 8,422,445 |
| 2951 | PTPRD | 9 | 8,423,160 | 2952 | PTPRD | 9 | 8,727,316 |
| 2953 | PTPRD | 9 | 8,728,267 | 2954 | PTPRD | 9 | 8,752,705 |
| 2955 | PTPRD | 9 | 8,764,062 | 2956 | PTPRD | 9 | 8,765,087 |
| 2957 | ADAMTSL1 | 9 | 18,714,225 | 2958 | ADAMTSL1 | 9 | 18,718,689 |
| 2959 | KIAA1797 | 9 | 20,678,117 | 2960 | KIAA1797 | 9 | 20,686,043 |
| 2961 | KIAA1797 | 9 | 20,732,210 | 2962 | KIAA1797 | 9 | 20,752,645 |
| 2963 | KIAA1797 | 9 | 20,754,870 | 2964 | KIAA1797 | 9 | 20,791,991 |
| 2965 | KIAA1797 | 9 | 20,794,446 | 2966 | KIAA1797 | 9 | 20,833,841 |
| 2967 | KIAA1797 | 9 | 20,872,525 | 2968 | KIAA1797 | 9 | 20,882,952 |
| 2969 | KIAA1797 | 9 | 20,886,938 | 2970 | KIAA1797 | 9 | 20,898,513 |
| 2971 | KIAA1797 | 9 | 20,914,474 | 2972 | KIAA1797 | 9 | 20,921,349 |
| 2973 | KIAA1797 | 9 | 20,935,207 | 2974 | KIAA1797 | 9 | 20,935,372 |
| 2975 | KIAA1797 | 9 | 20,943,335 | 2976 | KIAA1797 | 9 | 20,943,750 |
| 2977 | KIAA1797 | 9 | 20,951,906 | 2978 | KIAA1797 | 9 | 20,977,703 |
| 2979 | KIAA1797 | 9 | 20,978,426 | 2980 | KIAA1797 | 9 | 20,986,709 |
| 2981 | KIAA1797 | 9 | 20,989,770 | 2982 | IFT74 | 9 | 26,999,100 |
| 2983 | IFT74 | 9 | 27,052,721 | 2984 | IFT74 | 9 | 27,056,070 |
| 2985 | IFT74 | 9 | 27,063,650 | 2986 | TEK | 9 | 27,129,817 |
| 2987 | TEK | 9 | 27,142,292 | 2988 | TEK | 9 | 27,142,308 |
| 2989 | TEK | 9 | 27,144,617 | 2990 | TEK | 9 | 27,175,101 |
| 2991 | PIP5K1B | 9 | 70,499,527 | 2992 | PIP5K1B | 9 | 70,515,001 |
| 2993 | PIP5K1B | 9 | 70,515,728 | 2994 | PIP5K1B | 9 | 70,520,963 |
| 2995 | PIP5K1B | 9 | 70,545,037 | 2996 | PIP5K1B | 9 | 70,670,116 |
| 2997 | PIP5K1B | 9 | 70,703,782 | 2998 | PIP5K1B | 9 | 70,811,920 |
| 2999 | PIP5K1B | 9 | 70,814,515 | 3000 | APBA1 | 9 | 71,276,235 |
| 3001 | APBA1 | 9 | 71,280,626 | 3002 | APBA1 | 9 | 71,298,607 |
| 3003 | APBA1 | 9 | 71,324,247 | 3004 | APBA1 | 9 | 71,327,356 |
| 3005 | APBA1 | 9 | 71,332,520 | 3006 | APBA1 | 9 | 71,343,317 |
| 3007 | APBA1 | 9 | 71,415,835 | 3008 | MAMDC2 | 9 | 71,887,859 |
| 3009 | MAMDC2 | 9 | 71,892,836 | 3010 | MAMDC2 | 9 | 71,896,167 |
| 3011 | MAMDC2 | 9 | 71,913,927 | 3012 | MAMDC2 | 9 | 71,930,214 |
| 3013 | MAMDC2 | 9 | 71,979,450 | 3014 | MAMDC2 | 9 | 71,991,846 |
| 3015 | MAMDC2 | 9 | 71,998,663 | 3016 | MAMDC2 | 9 | 72,025,025 |
| 3017 | MAMDC2 | 9 | 72,051,438 | 3018 | MAMDC2 | 9 | 72,051,513 |
| 3019 | MAMDC2 | 9 | 72,053,813 | 3020 | TRPM3 | 9 | 72,346,211 |
| 3021 | TRPM3 | 9 | 72,383,248 | 3022 | TRPM3 | 9 | 72,384,667 |
| 3023 | TRPM3 | 9 | 72,616,673 | 3024 | TRPM3 | 9 | 72,617,325 |
| 3025 | TRPM3 | 9 | 72,673,741 | 3026 | TRPM3 | 9 | 72,946,351 |
| 3027 | TMC1 | 9 | 74,339,851 | 3028 | TMC1 | 9 | 74,345,877 |
| 3029 | TMC1 | 9 | 74,363,736 | 3030 | TMC1 | 9 | 74,379,155 |
| 3031 | TMC1 | 9 | 74,383,637 | 3032 | TMC1 | 9 | 74,415,525 |
| 3033 | TMC1 | 9 | 74,434,104 | 3034 | TMC1 | 9 | 74,470,431 |
| 3035 | TMC1 | 9 | 74,485,413 | 3036 | TMC1 | 9 | 74,507,002 |
| 3037 | TMC1 | 9 | 74,507,694 | 3038 | TMC1 | 9 | 74,537,387 |
| 3039 | TMC1 | 9 | 74,555,746 | 3040 | TMC1 | 9 | 74,558,826 |
| 3041 | TMC1 | 9 | 74,574,594 | 3042 | TMC1 | 9 | 74,579,921 |
| 3043 | TMC1 | 9 | 74,701,976 | 3044 | TRPM6 | 9 | 76,580,880 |
| 3045 | TRPM6 | 9 | 76,604,375 | 3046 | TRPM6 | 9 | 76,605,104 |
| 3047 | TRPM6 | 9 | 76,616,041 | 3048 | TRPM6 | 9 | 76,616,993 |
| 3049 | TRPM6 | 9 | 76,617,856 | 3050 | PCSK5 | 9 | 77,687,086 |
| 3051 | PCSK5 | 9 | 77,798,692 | 3052 | PCSK5 | 9 | 77,810,526 |
| 3053 | PCSK5 | 9 | 77,824,856 | 3054 | PCSK5 | 9 | 77,896,771 |
| 3055 | PCSK5 | 9 | 77,897,682 | 3056 | PCSK5 | 9 | 77,915,932 |
| 3057 | PCSK5 | 9 | 77,932,517 | 3058 | PCSK5 | 9 | 77,974,918 |
| 3059 | GNAQ | 9 | 79,595,252 | 3060 | GNAQ | 9 | 79,600,333 |
| 3061 | GNAQ | 9 | 79,659,567 | 3062 | GNAQ | 9 | 79,734,072 |
| 3063 | GNAQ | 9 | 79,809,631 | 3064 | GNAQ | 9 | 79,812,915 |
| 3065 | GNAQ | 9 | 79,845,641 | 3066 | GNAQ | 9 | 79,856,574 |
| 3067 | GNAQ | 9 | 79,868,777 | 3068 | GNAQ | 9 | 79,874,660 |
| 3069 | GNAQ | 9 | 79,908,815 | 3070 | GNAQ | 9 | 79,946,188 |
| 3071 | NTRK2 | 9 | 86,464,568 | 3072 | NTRK2 | 9 | 86,472,347 |
| 3073 | NTRK2 | 9 | 86,479,100 | 3074 | NTRK2 | 9 | 86,571,296 |
| 3075 | NTRK2 | 9 | 86,577,727 | 3076 | NTRK2 | 9 | 86,590,037 |
| 3077 | NTRK2 | 9 | 86,598,770 | 3078 | NTRK2 | 9 | 86,598,798 |
| 3079 | NTRK2 | 9 | 86,599,187 | 3080 | NTRK2 | 9 | 86,627,979 |
| 3081 | DAPK1 | 9 | 89,356,618 | 3082 | DAPK1 | 9 | 89,446,457 |
| 3083 | DAPK1 | 9 | 89,510,774 | 3084 | DAPK1 | 9 | 89,516,915 |
| 3085 | SHC3 | 9 | 90,829,608 | 3086 | DIRAS2 | 9 | 92,422,258 |
| 3087 | DIRAS2 | 9 | 92,426,243 | 3088 | DIRAS2 | 9 | 92,432,978 |
| 3089 | NFIL3 | 9 | 93,218,808 | 3090 | NFIL3 | 9 | 93,220,448 |
| 3091 | NFIL3 | 9 | 93,276,485 | 3092 | NFIL3 | 9 | 93,283,388 |
| 3093 | NFIL3 | 9 | 93,286,276 | 3094 | NFIL3 | 9 | 93,286,497 |
| 3095 | NFIL3 | 9 | 93,286,593 | 3096 | NFIL3 | 9 | 93,286,700 |
| 3097 | ZNF169 | 9 | 96,102,802 | 3098 | ZNF169 | 9 | 96,255,984 |
| 3099 | HIATL1 | 9 | 96,261,255 | 3100 | HIATL1 | 9 | 96,268,739 |
| 3101 | GABBR2 | 9 | 100,095,943 | 3102 | GABBR2 | 9 | 100,110,308 |
| 3103 | GABBR2 | 9 | 100,111,343 | 3104 | GABBR2 | 9 | 100,114,693 |
| 3105 | GABBR2 | 9 | 100,116,448 | 3106 | GABBR2 | 9 | 100,118,041 |
| 3107 | GABBR2 | 9 | 100,429,660 | 3108 | RP11-35N6.1 | 9 | 102,447,217 |
| 3109 | RP11-35N6.1 | 9 | 102,472,272 | 3110 | GRIN3A | 9 | 103,636,342 |
| 3111 | FKTN | 9 | 107,402,666 | 3112 | FKTN | 9 | 107,449,221 |
| 3113 | FKTN | 9 | 107,449,435 | 3114 | FKTN | 9 | 107,449,527 |
| 3115 | FKTN | 9 | 107,455,377 | 3116 | PALM2 | 9 | 111,500,859 |
| 3117 | PALM2 | 9 | 111,531,505 | 3118 | PALM2 | 9 | 111,545,842 |
| 3119 | PALM2 | 9 | 111,552,566 | 3120 | PALM2 | 9 | 111,555,049 |
| 3121 | PALM2 | 9 | 111,985,226 | 3122 | PALM2 | 9 | 111,985,595 |
| 3123 | SVEP1 | 9 | 112,145,525 | 3124 | SVEP1 | 9 | 112,152,393 |
| 3125 | SVEP1 | 9 | 112,154,879 | 3126 | SVEP1 | 9 | 112,166,117 |
| 3127 | SVEP1 | 9 | 112,167,878 | 3128 | SVEP1 | 9 | 112,395,423 |
| 3129 | ZNF618 | 9 | 115,804,104 | 3130 | ZNF618 | 9 | 115,820,286 |
| 3131 | ZNF618 | 9 | 115,839,747 | 3132 | ZNF618 | 9 | 115,840,427 |
| 3133 | ZNF618 | 9 | 115,848,968 | 3134 | ZNF618 | 9 | 115,862,471 |
| 3135 | CDK5RAP2 | 9 | 122,190,274 | 3136 | CDK5RAP2 | 9 | 122,245,733 |
| 3137 | CDK5RAP2 | 9 | 122,247,523 | 3138 | CDK5RAP2 | 9 | 122,341,167 |
| 3139 | CDK5RAP2 | 9 | 122,362,134 | 3140 | CDK5RAP2 | 9 | 122,370,634 |
| 3141 | RAB14 | 9 | 123,011,433 | 3142 | STOM | 9 | 123,210,311 |
| 3143 | DAB2IP | 9 | 123,691,611 | 3144 | TTLL11 | 9 | 123,780,890 |
| 3145 | TTLL11 | 9 | 123,816,925 | 3146 | TTLL11 | 9 | 123,894,371 |
| 3147 | TTLL11 | 9 | 123,904,206 | 3148 | TTLL11 | 9 | 123,908,883 |
| 3149 | LHX6 | 9 | 124,033,326 | 3150 | PTGS1 | 9 | 124,226,030 |
| 3151 | RALGPS1 | 9 | 128,740,226 | 3152 | RALGPS1 | 9 | 128,789,924 |
| 3153 | RALGPS1 | 9 | 128,809,594 | 3154 | RALGPS1 | 9 | 128,851,222 |
| 3155 | RALGPS1 | 9 | 128,902,817 | 3156 | RALGPS1 | 9 | 128,946,477 |
| 3157 | RALGPS1 | 9 | 128,955,452 | 3158 | RALGPS1 | 9 | 128,972,837 |
| 3159 | RALGPS1 | 9 | 128,973,145 | 3160 | RALGPS1 | 9 | 129,028,297 |
| 3161 | SLC25A25 | 9 | 129,895,358 | 3162 | SLC25A25 | 9 | 129,899,153 |
| 3163 | FREQ | 9 | 131,997,035 | 3164 | EXOSC2 | 9 | 132,557,580 |
| 3165 | ABL1 | 9 | 132,607,062 | 3166 | EXOSC2 | 9 | 132,620,443 |
| 3167 | ABL1 | 9 | 132,698,182 | 3168 | ABL1 | 9 | 132,722,573 |
| 3169 | ABL1 | 9 | 132,723,896 | 3170 | ABL1 | 9 | 132,729,556 |
| 3171 | ABL1 | 9 | 132,743,853 | 3172 | ABL1 | 9 | 132,757,571 |
| 3173 | NTNG2 | 9 | 134,032,706 | 3174 | NTNG2 | 9 | 134,048,486 |
| 3175 | NTNG2 | 9 | 134,061,758 | 3176 | NTNG2 | 9 | 134,063,788 |
| 3177 | NTNG2 | 9 | 134,063,884 | 3178 | NTNG2 | 9 | 134,072,800 |
| 3179 | TSC1 | 9 | 134,776,725 | 3180 | TSC1 | 9 | 134,786,003 |
| 3181 | TSC1 | 9 | 134,811,193 | 3182 | TSC1 | 9 | 134,812,111 |
| 3183 | VAV2 | 9 | 135,652,749 | 3184 | VAV2 | 9 | 135,708,866 |
| 3185 | VAV2 | 9 | 135,712,953 | 3186 | VAV2 | 9 | 135,714,835 |
| 3187 | VAV2 | 9 | 135,725,041 | 3188 | VAV2 | 9 | 135,735,578 |
| 3189 | VAV2 | 9 | 135,750,672 | 3190 | VAV2 | 9 | 135,797,591 |
| 3191 | VAV2 | 9 | 135,800,678 | 3192 | VAV2 | 9 | 135,816,278 |
| 3193 | OLFM1 | 9 | 137,163,836 | 3194 | OLFM1 | 9 | 137,166,820 |
| 3195 | KCNT1 | 9 | 137,739,699 | 3196 | KCNT1 | 9 | 137,760,712 |
| 3197 | KCNT1 | 9 | 137,761,268 | 3198 | KCNT1 | 9 | 137,771,812 |
| 3199 | KCNT1 | 9 | 137,780,294 | 3200 | NOTCH1 | 9 | 138,588,006 |
| 3201 | ABCA2 | 9 | 139,049,256 | 3202 | NPDC1 | 9 | 139,079,674 |
| 3203 | GRIN1 | 9 | 139,123,742 | 3204 | PNPLA7 | 9 | 139,552,139 |
| 3205 | CACNA1B | 9 | 139,875,052 | 3206 | CACNA1B | 9 | 140,019,421 |
| 3207 | CACNA1B | 9 | 140,019,503 | 3208 | CACNA1B | 9 | 140,029,466 |
| 3209 | CACNA1B | 9 | 140,075,368 | 3210 | CACNA1B | 9 | 140,078,171 |
| 3211 | CACNA1B | 9 | 140,089,212 | 3212 | CACNA1B | 9 | 140,094,586 |
| 3213 | CACNA1B | 9 | 140,121,687 | 3214 | PITRM1 | 10 | 3,173,747 |
| 3215 | PITRM1 | 10 | 3,179,380 | 3216 | PITRM1 | 10 | 3,181,527 |
| 3217 | PITRM1 | 10 | 3,192,065 | 3218 | PITRM1 | 10 | 3,196,365 |
| 3219 | PITRM1 | 10 | 3,197,632 | 3220 | PITRM1 | 10 | 3,198,140 |
| 3221 | PITRM1 | 10 | 3,198,512 | 3222 | PITRM1 | 10 | 3,209,794 |
| 3223 | PITRM1 | 10 | 3,213,179 | 3224 | PITRM1 | 10 | 3,782,844 |
| 3225 | PITRM1 | 10 | 3,786,569 | 3226 | PRKCQ | 10 | 6,508,611 |
| 3227 | PRKCQ | 10 | 6,509,161 | 3228 | PRKCQ | 10 | 6,509,823 |
| 3229 | PRKCQ | 10 | 6,512,253 | 3230 | PRKCQ | 10 | 7,151,877 |
| 3231 | CUGBP2 | 10 | 11,261,372 | 3232 | CUGBP2 | 10 | 11,397,516 |
| 3233 | CACNB2 | 10 | 18,499,288 | 3234 | CACNB2 | 10 | 18,693,867 |
| 3235 | CACNB2 | 10 | 18,737,688 | 3236 | CACNB2 | 10 | 18,751,294 |
| 3237 | CACNB2 | 10 | 18,756,352 | 3238 | CACNB2 | 10 | 18,767,907 |
| 3239 | CACNB2 | 10 | 18,781,800 | 3240 | CACNB2 | 10 | 18,784,954 |
| 3241 | CACNB2 | 10 | 18,850,680 | 3242 | CACNB2 | 10 | 18,875,360 |
| 3243 | ARMC3 | 10 | 23,192,732 | 3244 | ARMC3 | 10 | 23,204,056 |
| 3245 | ARMC3 | 10 | 23,243,088 | 3246 | ARMC3 | 10 | 23,249,050 |
| 3247 | ARMC3 | 10 | 23,264,868 | 3248 | ARMC3 | 10 | 23,277,574 |
| 3249 | ARMC3 | 10 | 23,289,115 | 3250 | ARMC3 | 10 | 23,318,053 |
| 3251 | ARMC3 | 10 | 23,337,258 | 3252 | ARMC3 | 10 | 23,343,422 |
| 3253 | ARHGAP21 | 10 | 24,973,706 | 3254 | ARHGAP21 | 10 | 25,007,098 |
| 3255 | ARHGAP21 | 10 | 25,017,790 | 3256 | ARHGAP21 | 10 | 25,037,439 |
| 3257 | ARHGAP21 | 10 | 25,046,553 | 3258 | ARHGAP21 | 10 | 25,121,861 |
| 3259 | MYO3A | 10 | 26,224,703 | 3260 | MYO3A | 10 | 26,227,755 |
| 3261 | MYO3A | 10 | 26,246,862 | 3262 | MYO3A | 10 | 26,247,055 |
| 3263 | MYO3A | 10 | 26,247,564 | 3264 | MYO3A | 10 | 26,252,100 |
| 3265 | MYO3A | 10 | 26,265,542 | 3266 | MYO3A | 10 | 26,266,216 |
| 3267 | MYO3A | 10 | 26,326,995 | 3268 | MYO3A | 10 | 26,344,078 |
| 3269 | MYO3A | 10 | 26,350,685 | 3270 | MYO3A | 10 | 26,352,830 |
| 3271 | MYO3A | 10 | 26,355,103 | 3272 | MYO3A | 10 | 26,385,171 |
| 3273 | MYO3A | 10 | 26,389,693 | 3274 | MYO3A | 10 | 26,396,941 |
| 3275 | MYO3A | 10 | 26,398,640 | 3276 | MYO3A | 10 | 26,443,297 |
| 3277 | MYO3A | 10 | 26,473,372 | 3278 | MYO3A | 10 | 26,486,318 |
| 3279 | MYO3A | 10 | 26,499,719 | 3280 | MYO3A | 10 | 26,503,136 |
| 3281 | MYO3A | 10 | 26,503,593 | 3282 | MYO3A | 10 | 26,511,966 |
| 3283 | MYO3A | 10 | 26,523,271 | 3284 | MYO3A | 10 | 26,523,510 |
| 3285 | MYO3A | 10 | 26,524,160 | 3286 | MYO3A | 10 | 26,526,934 |
| 3287 | MYO3A | 10 | 26,552,050 | 3288 | MYO3A | 10 | 26,677,147 |
| 3289 | MYO3A | 10 | 26,679,306 | 3290 | SLC16A9 | 10 | 61,084,017 |
| 3291 | SLC16A9 | 10 | 61,120,938 | 3292 | SLC16A9 | 10 | 61,122,758 |
| 3293 | SLC16A9 | 10 | 61,177,020 | 3294 | SLC16A9 | 10 | 61,178,790 |
| 3295 | SLC16A9 | 10 | 61,187,929 | 3296 | JMJD1C | 10 | 64,732,014 |
| 3297 | JMJD1C | 10 | 64,761,165 | 3298 | JMJD1C | 10 | 64,771,213 |
| 3299 | JMJD1C | 10 | 64,778,162 | 3300 | JMJD1C | 10 | 64,791,571 |
| 3301 | JMJD1C | 10 | 64,792,793 | 3302 | JMJD1C | 10 | 64,873,814 |
| 3303 | JMJD1C | 10 | 64,917,025 | 3304 | CDH23 | 10 | 72,828,713 |
| 3305 | CDH23 | 10 | 72,997,429 | 3306 | CDH23 | 10 | 73,084,016 |
| 3307 | CDH23 | 10 | 73,104,912 | 3308 | CDH23 | 10 | 73,171,562 |
| 3309 | CDH23 | 10 | 73,192,700 | 3310 | CDH23 | 10 | 73,209,936 |
| 3311 | CDH23 | 10 | 73,211,015 | 3312 | CDH23 | 10 | 73,214,092 |
| 3313 | CDH23 | 10 | 73,228,958 | 3314 | CDH23 | 10 | 73,236,209 |
| 3315 | CDH23 | 10 | 73,251,566 | 3316 | KCNMA1 | 10 | 78,240,799 |
| 3317 | KCNMA1 | 10 | 78,297,136 | 3318 | KCNMA1 | 10 | 78,300,503 |
| 3319 | KCNMA1 | 10 | 78,319,405 | 3320 | KCNMA1 | 10 | 78,324,802 |
| 3321 | KCNMA1 | 10 | 78,337,197 | 3322 | KCNMA1 | 10 | 78,348,173 |
| 3323 | KCNMA1 | 10 | 78,426,444 | 3324 | KCNMA1 | 10 | 78,426,609 |
| 3325 | KCNMA1 | 10 | 78,446,565 | 3326 | KCNMA1 | 10 | 78,616,033 |
| 3327 | KCNMA1 | 10 | 78,626,486 | 3328 | KCNMA1 | 10 | 78,738,696 |
| 3329 | KCNMA1 | 10 | 78,738,970 | 3330 | KCNMA1 | 10 | 78,756,964 |
| 3331 | KCNMA1 | 10 | 78,757,037 | 3332 | KCNMA1 | 10 | 78,794,600 |
| 3333 | KCNMA1 | 10 | 79,033,394 | 3334 | KCNMA1 | 10 | 79,073,940 |
| 3335 | KCNMA1 | 10 | 79,094,637 | 3336 | KCNMA1 | 10 | 79,162,833 |
| 3337 | KCNMA1 | 10 | 79,168,796 | 3338 | KCNMA1 | 10 | 79,176,445 |
| 3339 | NRG3 | 10 | 84,078,553 | 3340 | NRG3 | 10 | 84,136,852 |
| 3341 | NRG3 | 10 | 84,197,554 | 3342 | NRG3 | 10 | 84,479,001 |
| 3343 | NRG3 | 10 | 84,479,024 | 3344 | NRG3 | 10 | 84,487,647 |
| 3345 | NRG3 | 10 | 84,604,364 | 3346 | NRG3 | 10 | 84,613,706 |
| 3347 | NRG3 | 10 | 84,616,939 | 3348 | NRG3 | 10 | 84,679,040 |
| 3349 | NRG3 | 10 | 84,680,434 | 3350 | NRG3 | 10 | 84,681,866 |
| 3351 | NRG3 | 10 | 84,683,470 | 3352 | NRG3 | 10 | 84,688,185 |
| 3353 | NRG3 | 10 | 84,820,632 | 3354 | SORBS1 | 10 | 97,064,414 |
| 3355 | SORBS1 | 10 | 97,075,121 | 3356 | SORBS1 | 10 | 97,076,023 |
| 3357 | SORBS1 | 10 | 97,095,565 | 3358 | SORBS1 | 10 | 97,097,088 |
| 3359 | SORBS1 | 10 | 97,109,583 | 3360 | SORBS1 | 10 | 97,112,231 |
| 3361 | SORBS1 | 10 | 97,112,420 | 3362 | SORBS1 | 10 | 97,122,546 |
| 3363 | SORBS1 | 10 | 97,122,783 | 3364 | SORBS1 | 10 | 97,150,503 |
| 3365 | SORBS1 | 10 | 97,200,805 | 3366 | SORBS1 | 10 | 97,204,408 |
| 3367 | SORBS1 | 10 | 97,216,419 | 3368 | SORBS1 | 10 | 97,216,500 |
| 3369 | SORBS1 | 10 | 97,329,428 | 3370 | SORCS3 | 10 | 106,367,232 |
| 3371 | SORCS3 | 10 | 106,371,034 | 3372 | SORCS3 | 10 | 106,374,605 |
| 3373 | SORCS3 | 10 | 106,590,333 | 3374 | SORCS3 | 10 | 106,614,338 |
| 3375 | SORCS3 | 10 | 106,636,964 | 3376 | SORCS3 | 10 | 106,646,127 |
| 3377 | SORCS3 | 10 | 106,664,021 | 3378 | SORCS3 | 10 | 106,684,869 |
| 3379 | SORCS3 | 10 | 106,684,970 | 3380 | SORCS3 | 10 | 106,689,202 |
| 3381 | SORCS3 | 10 | 106,701,972 | 3382 | SORCS3 | 10 | 106,703,623 |
| 3383 | SORCS3 | 10 | 106,784,111 | 3384 | SORCS3 | 10 | 106,897,228 |
| 3385 | SORCS3 | 10 | 106,906,037 | 3386 | SORCS3 | 10 | 106,906,641 |
| 3387 | SORCS3 | 10 | 106,935,226 | 3388 | SORCS3 | 10 | 107,025,958 |
| 3389 | VTI1A | 10 | 114,212,444 | 3390 | VTI1A | 10 | 114,214,053 |
| 3391 | VTI1A | 10 | 114,214,492 | 3392 | VTI1A | 10 | 114,218,153 |
| 3393 | VTI1A | 10 | 114,226,855 | 3394 | VTI1A | 10 | 114,228,361 |
| 3395 | VTI1A | 10 | 114,404,784 | 3396 | VTI1A | 10 | 114,424,611 |
| 3397 | VTI1A | 10 | 114,426,056 | 3398 | VTI1A | 10 | 114,454,027 |
| 3399 | VTI1A | 10 | 114,465,945 | 3400 | VTI1A | 10 | 114,469,252 |
| 3401 | VTI1A | 10 | 114,471,012 | 3402 | VTI1A | 10 | 114,473,068 |
| 3403 | VTI1A | 10 | 114,489,994 | 3404 | VTI1A | 10 | 114,506,363 |
| 3405 | VTI1A | 10 | 114,508,308 | 3406 | ATRNL1 | 10 | 116,818,582 |
| 3407 | ATRNL1 | 10 | 116,818,761 | 3408 | ATRNL1 | 10 | 116,826,992 |
| 3409 | ATRNL1 | 10 | 117,051,783 | 3410 | ATRNL1 | 10 | 117,186,878 |
| 3411 | ATRNL1 | 10 | 117,208,818 | 3412 | ATRNL1 | 10 | 117,226,168 |
| 3413 | ATRNL1 | 10 | 117,257,300 | 3414 | ATRNL1 | 10 | 117,342,514 |
| 3415 | ATRNL1 | 10 | 117,348,932 | 3416 | ATRNL1 | 10 | 117,350,294 |
| 3417 | ATRNL1 | 10 | 117,404,353 | 3418 | ATRNL1 | 10 | 117,429,854 |
| 3419 | ATRNL1 | 10 | 117,485,967 | 3420 | ATRNL1 | 10 | 117,697,723 |
| 3421 | ATRNL1 | 10 | 117,743,056 | 3422 | ATRNL1 | 10 | 117,761,145 |
| 3423 | HSPA12A | 10 | 118,432,901 | 3424 | HSPA12A | 10 | 118,434,753 |
| 3425 | HSPA12A | 10 | 118,438,068 | 3426 | HSPA12A | 10 | 118,446,140 |
| 3427 | HSPA12A | 10 | 118,463,943 | 3428 | HSPA12A | 10 | 118,527,758 |
| 3429 | GRK5 | 10 | 120,961,454 | 3430 | GRK5 | 10 | 121,055,451 |
| 3431 | ATE1 | 10 | 123,426,686 | 3432 | ATE1 | 10 | 123,427,443 |
| 3433 | ATE1 | 10 | 123,432,831 | 3434 | ATE1 | 10 | 123,440,223 |
| 3435 | ATE1 | 10 | 123,450,896 | 3436 | ATE1 | 10 | 123,491,722 |
| 3437 | ATE1 | 10 | 123,491,947 | 3438 | ATE1 | 10 | 123,521,812 |
| 3439 | ATE1 | 10 | 123,529,351 | 3440 | ATE1 | 10 | 123,529,439 |
| 3441 | ATE1 | 10 | 123,531,179 | 3442 | ATE1 | 10 | 123,531,856 |
| 3443 | ATE1 | 10 | 123,539,198 | 3444 | ATE1 | 10 | 123,546,416 |
| 3445 | ATE1 | 10 | 123,604,845 | 3446 | ATE1 | 10 | 123,644,015 |
| 3447 | ATE1 | 10 | 123,648,608 | 3448 | ATE1 | 10 | 123,651,712 |
| 3449 | ATE1 | 10 | 123,663,196 | 3450 | ATE1 | 10 | 123,666,737 |
| 3451 | ATE1 | 10 | 123,669,674 | 3452 | ATE1 | 10 | 123,697,603 |
| 3453 | CTBP2 | 10 | 126,677,518 | 3454 | CTBP2 | 10 | 127,123,254 |
| 3455 | CTBP2 | 10 | 127,125,130 | 3456 | CTBP2 | 10 | 127,127,898 |
| 3457 | STIM1 | 11 | 3,847,536 | 3458 | STIM1 | 11 | 3,867,621 |
| 3459 | STIM1 | 11 | 3,915,404 | 3460 | STIM1 | 11 | 3,927,655 |
| 3461 | STIM1 | 11 | 3,931,164 | 3462 | STIM1 | 11 | 3,949,530 |
| 3463 | STIM1 | 11 | 3,949,807 | 3464 | STIM1 | 11 | 3,960,254 |
| 3465 | STIM1 | 11 | 4,033,624 | 3466 | STIM1 | 11 | 4,042,105 |
| 3467 | STIM1 | 11 | 4,085,062 | 3468 | GALNTL4 | 11 | 11,222,747 |
| 3469 | GALNTL4 | 11 | 11,228,193 | 3470 | GALNTL4 | 11 | 11,246,167 |
| 3471 | GALNTL4 | 11 | 11,497,136 | 3472 | MICAL2 | 11 | 12,084,055 |
| 3473 | MICAL2 | 11 | 12,092,180 | 3474 | MICAL2 | 11 | 12,139,036 |
| 3475 | MICAL2 | 11 | 12,142,872 | 3476 | MICAL2 | 11 | 12,150,320 |
| 3477 | MICAL2 | 11 | 12,156,032 | 3478 | MICAL2 | 11 | 12,175,779 |
| 3479 | MICAL2 | 11 | 12,191,280 | 3480 | MICAL2 | 11 | 12,212,874 |
| 3481 | MICAL2 | 11 | 12,222,118 | 3482 | ARNTL | 11 | 13,212,114 |
| 3483 | ARNTL | 11 | 13,212,547 | 3484 | ARNTL | 11 | 13,222,791 |
| 3485 | ARNTL | 11 | 13,231,816 | 3486 | ARNTL | 11 | 13,234,603 |
| 3487 | ARNTL | 11 | 13,249,824 | 3488 | ARNTL | 11 | 13,250,844 |
| 3489 | ARNTL | 11 | 13,262,887 | 3490 | ARNTL | 11 | 13,267,430 |
| 3491 | ARNTL | 11 | 13,274,540 | 3492 | ARNTL | 11 | 13,277,919 |
| 3493 | ARNTL | 11 | 13,302,169 | 3494 | ARNTL | 11 | 13,366,374 |
| 3495 | ARNTL | 11 | 13,366,419 | 3496 | SPON1 | 11 | 13,877,677 |
| 3497 | SPON1 | 11 | 13,922,920 | 3498 | SPON1 | 11 | 13,990,100 |
| 3499 | SPON1 | 11 | 13,994,054 | 3500 | SPON1 | 11 | 14,004,879 |
| 3501 | SPON1 | 11 | 14,005,230 | 3502 | SPON1 | 11 | 14,005,260 |
| 3503 | SPON1 | 11 | 14,008,775 | 3504 | SPON1 | 11 | 14,014,762 |
| 3505 | SPON1 | 11 | 14,014,854 | 3506 | SPON1 | 11 | 14,023,125 |
| 3507 | SPON1 | 11 | 14,034,087 | 3508 | SPON1 | 11 | 14,058,326 |
| 3509 | SPON1 | 11 | 14,070,335 | 3510 | SPON1 | 11 | 14,075,677 |
| 3511 | SPON1 | 11 | 14,115,440 | 3512 | SPON1 | 11 | 14,169,786 |
| 3513 | SPON1 | 11 | 14,215,231 | 3514 | SPON1 | 11 | 14,248,953 |
| 3515 | IGSF22 | 11 | 18,646,965 | 3516 | NELL1 | 11 | 20,753,829 |
| 3517 | KCNA4 | 11 | 30,011,330 | 3518 | KCNA4 | 11 | 30,174,079 |
| 3519 | C11ORF49 | 11 | 47,114,253 | 3520 | C11ORF49 | 11 | 47,130,872 |
| 3521 | C11ORF49 | 11 | 47,132,581 | 3522 | C11ORF49 | 11 | 47,144,987 |
| 3523 | 81.99 mb | 11 | 81,921,684 | 3524 | 81.99 mb | 11 | 81,928,698 |
| 3525 | 81.99 mb | 11 | 81,935,230 | 3526 | DLG2 | 11 | 82,720,706 |
| 3527 | DLG2 | 11 | 82,925,435 | 3528 | DLG2 | 11 | 83,018,964 |
| 3529 | DLG2 | 11 | 83,021,566 | 3530 | DLG2 | 11 | 83,036,277 |
| 3531 | DLG2 | 11 | 83,055,612 | 3532 | DLG2 | 11 | 83,083,527 |
| 3533 | DLG2 | 11 | 83,086,000 | 3534 | DLG2 | 11 | 83,099,929 |
| 3535 | DLG2 | 11 | 83,189,802 | 3536 | DLG2 | 11 | 83,212,271 |
| 3537 | DLG2 | 11 | 83,418,483 | 3538 | DLG2 | 11 | 83,452,078 |
| 3539 | DLG2 | 11 | 83,517,920 | 3540 | DLG2 | 11 | 83,609,529 |
| 3541 | DLG2 | 11 | 84,136,207 | 3542 | DLG2 | 11 | 84,140,727 |
| 3543 | DLG2 | 11 | 84,147,518 | 3544 | DLG2 | 11 | 84,170,883 |
| 3545 | DLG2 | 11 | 84,171,952 | 3546 | DLG2 | 11 | 84,214,566 |
| 3547 | DLG2 | 11 | 84,251,688 | 3548 | DLG2 | 11 | 84,251,805 |
| 3549 | DLG2 | 11 | 84,273,766 | 3550 | DLG2 | 11 | 84,283,321 |
| 3551 | DLG2 | 11 | 84,283,477 | 3552 | DLG2 | 11 | 84,340,897 |
| 3553 | DLG2 | 11 | 84,399,900 | 3554 | DLG2 | 11 | 84,425,370 |
| 3555 | DLG2 | 11 | 84,428,334 | 3556 | ELMOD1 | 11 | 106,964,269 |
| 3557 | ELMOD1 | 11 | 107,036,969 | 3558 | ELMOD1 | 11 | 107,051,899 |
| 3559 | ELMOD1 | 11 | 107,077,060 | 3560 | OPCML | 11 | 131,718,194 |
| 3561 | OPCML | 11 | 131,734,280 | 3562 | OPCML | 11 | 131,771,635 |
| 3563 | OPCML | 11 | 131,776,950 | 3564 | OPCML | 11 | 131,778,201 |
| 3565 | OPCML | 11 | 131,792,538 | 3566 | OPCML | 11 | 131,819,986 |
| 3567 | OPCML | 11 | 132,037,815 | 3568 | OPCML | 11 | 132,058,790 |
| 3569 | OPCML | 11 | 132,071,379 | 3570 | OPCML | 11 | 132,086,652 |
| 3571 | OPCML | 11 | 132,087,137 | 3572 | OPCML | 11 | 132,639,204 |
| 3573 | OPCML | 11 | 132,649,186 | 3574 | OPCML | 11 | 132,665,988 |
| 3575 | OPCML | 11 | 132,803,817 | 3576 | OPCML | 11 | 132,813,942 |
| 3577 | OPCML | 11 | 132,820,428 | 3578 | OPCML | 11 | 132,820,536 |
| 3579 | OPCML | 11 | 132,820,701 | 3580 | OPCML | 11 | 132,821,079 |
| 3581 | OPCML | 11 | 132,856,014 | 3582 | OPCML | 11 | 132,868,027 |
| 3583 | OPCML | 11 | 132,873,386 | 3584 | OPCML | 11 | 132,874,542 |
| 3585 | OPCML | 11 | 132,884,694 | 3586 | OPCML | 11 | 132,895,402 |
| 3587 | OPCML | 11 | 132,895,679 | 3588 | OPCML | 11 | 132,895,944 |
| 3589 | OPCML | 11 | 132,897,912 | 3590 | WNT5B | 12 | 1,617,734 |
| 3591 | TSPAN9 | 12 | 3,065,463 | 3592 | TSPAN9 | 12 | 3,216,860 |
| 3593 | TSPAN9 | 12 | 3,258,265 | 3594 | TSPAN9 | 12 | 3,310,366 |
| 3595 | TSPAN9 | 12 | 3,331,863 | 3596 | TMEM16B | 12 | 5,505,585 |
| 3597 | TMEM16B | 12 | 5,507,133 | 3598 | TMEM16B | 12 | 5,694,683 |
| 3599 | TMEM16B | 12 | 5,697,894 | 3600 | TMEM16B | 12 | 5,704,425 |
| 3601 | TMEM16B | 12 | 5,711,994 | 3602 | TMEM16B | 12 | 5,717,063 |
| 3603 | TMEM16B | 12 | 5,793,894 | 3604 | TMEM16B | 12 | 5,870,387 |
| 3605 | TMEM16B | 12 | 5,892,756 | 3606 | TMEM16B | 12 | 5,894,743 |
| 3607 | TMEM16B | 12 | 5,900,666 | 3608 | STYK1 | 12 | 10,665,965 |
| 3609 | STYK1 | 12 | 10,666,462 | 3610 | STYK1 | 12 | 10,667,780 |
| 3611 | STYK1 | 12 | 10,673,382 | 3612 | STYK1 | 12 | 10,676,279 |
| 3613 | STYK1 | 12 | 10,696,179 | 3614 | STYK1 | 12 | 10,697,767 |
| 3615 | STYK1 | 12 | 10,708,924 | 3616 | STYK1 | 12 | 10,711,189 |
| 3617 | LOC729025 | 12 | 16,235,442 | 3618 | LOC729025 | 12 | 16,236,368 |
| 3619 | LOC729025 | 12 | 16,250,464 | 3620 | LOC729025 | 12 | 16,264,150 |
| 3621 | LOC729025 | 12 | 16,288,678 | 3622 | LOC729025 | 12 | 16,297,957 |
| 3623 | LOC729025 | 12 | 16,298,403 | 3624 | LOC729025 | 12 | 16,302,981 |
| 3625 | LOC729025 | 12 | 16,310,672 | 3626 | LOC729025 | 12 | 16,319,824 |
| 3627 | LOC729025 | 12 | 16,328,662 | 3628 | LOC729025 | 12 | 16,328,782 |
| 3629 | LOC729025 | 12 | 16,334,812 | 3630 | LOC729025 | 12 | 16,384,311 |
| 3631 | PIK3C2G | 12 | 18,237,964 | 3632 | PIK3C2G | 12 | 18,274,187 |
| 3633 | PIK3C2G | 12 | 18,291,303 | 3634 | PIK3C2G | 12 | 18,301,821 |
| 3635 | ITPR2 | 12 | 26,382,742 | 3636 | ITPR2 | 12 | 26,383,105 |
| 3637 | ITPR2 | 12 | 26,475,978 | 3638 | ITPR2 | 12 | 26,476,845 |
| 3639 | ITPR2 | 12 | 26,477,096 | 3640 | ITPR2 | 12 | 26,624,329 |
| 3641 | CNOT2 | 12 | 68,794,819 | 3642 | CNOT2 | 12 | 68,819,144 |
| 3643 | CNOT2 | 12 | 68,831,198 | 3644 | CNOT2 | 12 | 68,841,926 |
| 3645 | CNOT2 | 12 | 68,893,334 | 3646 | CNOT2 | 12 | 68,960,922 |
| 3647 | CNOT2 | 12 | 68,977,572 | 3648 | CNOT2 | 12 | 69,001,757 |
| 3649 | CNOT2 | 12 | 69,005,612 | 3650 | CNOT2 | 12 | 69,015,087 |
| 3651 | CNOT2 | 12 | 69,023,213 | 3652 | CNOT2 | 12 | 69,026,461 |
| 3653 | CNOT2 | 12 | 69,027,002 | 3654 | CNOT2 | 12 | 69,063,143 |
| 3655 | KCNC2 | 12 | 73,596,702 | 3656 | KCNC2 | 12 | 73,597,602 |
| 3657 | KCNC2 | 12 | 73,620,979 | 3658 | KCNC2 | 12 | 73,625,557 |
| 3659 | KCNC2 | 12 | 73,723,470 | 3660 | KCNC2 | 12 | 73,877,027 |
| 3661 | KCNC2 | 12 | 73,886,479 | 3662 | KCNC2 | 12 | 73,898,155 |
| 3663 | NAV3 | 12 | 76,718,256 | 3664 | NAV3 | 12 | 76,748,290 |
| 3665 | NAV3 | 12 | 76,793,282 | 3666 | NAV3 | 12 | 76,798,556 |
| 3667 | NAV3 | 12 | 76,817,706 | 3668 | NAV3 | 12 | 76,824,819 |
| 3669 | NAV3 | 12 | 76,839,838 | 3670 | NAV3 | 12 | 76,845,308 |
| 3671 | NAV3 | 12 | 76,847,522 | 3672 | NAV3 | 12 | 76,854,382 |
| 3673 | NAV3 | 12 | 76,862,517 | 3674 | NAV3 | 12 | 76,872,382 |
| 3675 | NAV3 | 12 | 76,891,682 | 3676 | NAV3 | 12 | 77,014,895 |
| 3677 | NAV3 | 12 | 77,064,747 | 3678 | NAV3 | 12 | 77,070,387 |
| 3679 | NAV3 | 12 | 77,126,330 | 3680 | GAS2L3 | 12 | 99,495,794 |
| 3681 | GAS2L3 | 12 | 99,498,724 | 3682 | GAS2L3 | 12 | 99,519,980 |
| 3683 | CHST11 | 12 | 103,426,320 | 3684 | CHST11 | 12 | 103,448,913 |
| 3685 | ATXN2 | 12 | 110,487,733 | 3686 | ATXN2 | 12 | 110,547,258 |
| 3687 | PLA2G1B | 12 | 119,247,148 | 3688 | MTIF3 | 13 | 26,895,999 |
| 3689 | MTIF3 | 13 | 26,938,502 | 3690 | MTIF3 | 13 | 26,939,055 |
| 3691 | MTIF3 | 13 | 26,945,908 | 3692 | MTIF3 | 13 | 26,979,535 |
| 3693 | SLC46A3 | 13 | 28,207,069 | 3694 | SLC46A3 | 13 | 28,267,317 |
| 3695 | SLC46A3 | 13 | 28,270,443 | 3696 | UBL3 | 13 | 29,334,889 |
| 3697 | UBL3 | 13 | 29,360,712 | 3698 | UBL3 | 13 | 29,362,035 |
| 3699 | N4BP2L2 | 13 | 31,898,581 | 3700 | N4BP2L2 | 13 | 31,915,043 |
| 3701 | N4BP2L2 | 13 | 31,934,759 | 3702 | N4BP2L2 | 13 | 32,021,516 |
| 3703 | NBEA | 13 | 33,950,130 | 3704 | NBEA | 13 | 34,391,285 |
| 3705 | NBEA | 13 | 34,694,247 | 3706 | NBEA | 13 | 34,706,182 |
| 3707 | NBEA | 13 | 34,784,368 | 3708 | NBEA | 13 | 34,784,675 |
| 3709 | NBEA | 13 | 34,835,455 | 3710 | NBEA | 13 | 34,844,029 |
| 3711 | NBEA | 13 | 34,878,006 | 3712 | NBEA | 13 | 34,964,578 |
| 3713 | NBEA | 13 | 34,969,786 | 3714 | NBEA | 13 | 34,979,260 |
| 3715 | NBEA | 13 | 34,980,142 | 3716 | NBEA | 13 | 34,988,680 |
| 3717 | NBEA | 13 | 35,037,473 | 3718 | NBEA | 13 | 35,070,282 |
| 3719 | NBEA | 13 | 35,086,809 | 3720 | NBEA | 13 | 35,087,894 |
| 3721 | NBEA | 13 | 35,112,563 | 3722 | NBEA | 13 | 35,118,281 |
| 3723 | NBEA | 13 | 35,130,015 | 3724 | NBEA | 13 | 35,142,667 |
| 3725 | TRPC4 | 13 | 37,134,885 | 3726 | TRPC4 | 13 | 37,148,211 |
| 3727 | TRPC4 | 13 | 37,178,430 | 3728 | TRPC4 | 13 | 37,187,961 |
| 3729 | TRPC4 | 13 | 37,203,414 | 3730 | TRPC4 | 13 | 37,247,236 |
| 3731 | TRPC4 | 13 | 37,259,744 | 3732 | TRPC4 | 13 | 37,343,288 |
| 3733 | FNDC3A | 13 | 48,210,811 | 3734 | FNDC3A | 13 | 48,211,076 |
| 3735 | PCDH17 | 13 | 57,157,493 | 3736 | PCDH17 | 13 | 57,209,470 |
| 3737 | PCDH20 | 13 | 60,876,811 | 3738 | PCDH20 | 13 | 60,884,919 |
| 3739 | PCDH20 | 13 | 60,887,176 | 3740 | LMO7 | 13 | 75,185,966 |
| 3741 | LMO7 | 13 | 75,218,115 | 3742 | LMO7 | 13 | 75,241,934 |
| 3743 | LMO7 | 13 | 75,245,817 | 3744 | LMO7 | 13 | 75,260,740 |
| 3745 | LMO7 | 13 | 75,261,656 | 3746 | LMO7 | 13 | 75,261,722 |
| 3747 | LMO7 | 13 | 75,293,621 | 3748 | LMO7 | 13 | 75,308,726 |
| 3749 | LMO7 | 13 | 75,311,839 | 3750 | LMO7 | 13 | 75,315,102 |
| 3751 | LMO7 | 13 | 75,319,632 | 3752 | LMO7 | 13 | 75,321,249 |
| 3753 | LMO7 | 13 | 75,334,096 | 3754 | SLAIN1 | 13 | 77,130,842 |
| 3755 | SLAIN1 | 13 | 77,151,328 | 3756 | SLAIN1 | 13 | 77,192,452 |
| 3757 | SLAIN1 | 13 | 77,192,550 | 3758 | SLAIN1 | 13 | 77,211,551 |
| 3759 | SLAIN1 | 13 | 77,232,218 | 3760 | SLAIN1 | 13 | 77,290,759 |
| 3761 | GPC5 | 13 | 90,547,957 | 3762 | GPC5 | 13 | 90,811,945 |
| 3763 | GPC5 | 13 | 90,818,043 | 3764 | GPC5 | 13 | 90,832,063 |
| 3765 | GPC5 | 13 | 90,924,773 | 3766 | GPC5 | 13 | 90,925,132 |
| 3767 | GPC5 | 13 | 90,931,610 | 3768 | GPC5 | 13 | 90,931,942 |
| 3769 | GPC5 | 13 | 90,932,220 | 3770 | GPC5 | 13 | 91,109,203 |
| 3771 | GPC5 | 13 | 91,143,580 | 3772 | GPC5 | 13 | 91,145,267 |
| 3773 | GPC5 | 13 | 91,149,048 | 3774 | GPC5 | 13 | 91,159,705 |
| 3775 | GPC5 | 13 | 91,160,283 | 3776 | GPC5 | 13 | 91,222,210 |
| 3777 | GPC5 | 13 | 91,293,729 | 3778 | GPC5 | 13 | 91,346,842 |
| 3779 | GPC5 | 13 | 91,356,566 | 3780 | GPC5 | 13 | 91,382,163 |
| 3781 | GPC5 | 13 | 91,389,873 | 3782 | GPC5 | 13 | 91,399,197 |
| 3783 | GPC5 | 13 | 92,117,688 | 3784 | GPC5 | 13 | 92,117,738 |
| 3785 | GPC5 | 13 | 92,121,270 | 3786 | GPC5 | 13 | 92,164,430 |
| 3787 | GPC5 | 13 | 92,275,844 | 3788 | GPC5 | 13 | 92,310,485 |
| 3789 | GPC5 | 13 | 92,332,949 | 3790 | GPC5 | 13 | 92,347,342 |
| 3791 | GPC5 | 13 | 92,354,245 | 3792 | GPC5 | 13 | 92,362,008 |
| 3793 | GPC6 | 13 | 92,673,304 | 3794 | GPC6 | 13 | 92,693,343 |
| 3795 | GPC6 | 13 | 92,712,064 | 3796 | GPC6 | 13 | 92,775,697 |
| 3797 | GPC6 | 13 | 92,805,108 | 3798 | GPC6 | 13 | 92,807,207 |
| 3799 | GPC6 | 13 | 92,807,479 | 3800 | GPC6 | 13 | 92,807,544 |
| 3801 | GPC6 | 13 | 92,809,170 | 3802 | GPC6 | 13 | 92,916,576 |
| 3803 | GPC6 | 13 | 93,081,095 | 3804 | GPC6 | 13 | 93,088,009 |
| 3805 | GPC6 | 13 | 93,091,677 | 3806 | GPC6 | 13 | 93,115,588 |
| 3807 | GPC6 | 13 | 93,183,430 | 3808 | GPC6 | 13 | 93,185,878 |
| 3809 | GPC6 | 13 | 93,196,895 | 3810 | GPC6 | 13 | 93,196,981 |
| 3811 | GPC6 | 13 | 93,235,896 | 3812 | GPC6 | 13 | 93,340,807 |
| 3813 | GPC6 | 13 | 93,341,695 | 3814 | GPC6 | 13 | 93,416,682 |
| 3815 | GPC6 | 13 | 93,417,250 | 3816 | GPC6 | 13 | 93,430,821 |
| 3817 | GPC6 | 13 | 93,434,569 | 3818 | GPC6 | 13 | 93,497,436 |
| 3819 | GPC6 | 13 | 93,540,169 | 3820 | GPC6 | 13 | 93,667,409 |
| 3821 | GPC6 | 13 | 93,668,359 | 3822 | GPC6 | 13 | 93,851,561 |
| 3823 | NALCN | 13 | 100,517,778 | 3824 | NALCN | 13 | 100,522,814 |
| 3825 | NALCN | 13 | 100,523,120 | 3826 | NALCN | 13 | 100,535,252 |
| 3827 | NALCN | 13 | 100,611,732 | 3828 | NALCN | 13 | 100,681,085 |
| 3829 | NALCN | 13 | 100,688,436 | 3830 | NALCN | 13 | 100,690,246 |
| 3831 | NALCN | 13 | 100,700,656 | 3832 | NALCN | 13 | 100,766,311 |
| 3833 | NALCN | 13 | 100,774,404 | 3834 | NALCN | 13 | 100,777,500 |
| 3835 | NALCN | 13 | 100,849,091 | 3836 | NALCN | 13 | 100,853,208 |
| 3837 | NALCN | 13 | 100,906,309 | 3838 | ITGBL1 | 13 | 100,939,679 |
| 3839 | ITGBL1 | 13 | 100,956,004 | 3840 | ITGBL1 | 13 | 100,973,899 |
| 3841 | ITGBL1 | 13 | 101,003,300 | 3842 | ITGBL1 | 13 | 101,022,894 |
| 3843 | ITGBL1 | 13 | 101,028,277 | 3844 | ITGBL1 | 13 | 101,066,640 |
| 3845 | ITGBL1 | 13 | 101,070,551 | 3846 | ITGBL1 | 13 | 101,075,206 |
| 3847 | ITGBL1 | 13 | 101,088,453 | 3848 | ITGBL1 | 13 | 101,144,060 |
| 3849 | ITGBL1 | 13 | 101,163,997 | 3850 | ITGBL1 | 13 | 101,164,826 |
| 3851 | ITGBL1 | 13 | 101,165,404 | 3852 | ITGBL1 | 13 | 101,165,489 |
| 3853 | WDR23 | 14 | 23,656,673 | 3854 | WDR23 | 14 | 23,664,573 |
| 3855 | WDR23 | 14 | 23,671,158 | 3856 | NOVA1 | 14 | 26,027,844 |
| 3857 | NOVA1 | 14 | 26,060,196 | 3858 | NOVA1 | 14 | 26,107,933 |
| 3859 | NOVA1 | 14 | 26,129,186 | 3860 | NOVA1 | 14 | 26,159,322 |
| 3861 | NOVA1 | 14 | 26,193,254 | 3862 | NOVA1 | 14 | 26,201,964 |
| 3863 | NOVA1 | 14 | 26,210,860 | 3864 | NPAS3 | 14 | 32,658,581 |
| 3865 | NPAS3 | 14 | 32,661,665 | 3866 | NPAS3 | 14 | 32,777,738 |
| 3867 | NPAS3 | 14 | 32,782,805 | 3868 | NPAS3 | 14 | 32,887,201 |
| 3869 | NPAS3 | 14 | 32,887,304 | 3870 | NPAS3 | 14 | 32,894,144 |
| 3871 | NPAS3 | 14 | 32,983,731 | 3872 | NPAS3 | 14 | 33,099,951 |
| 3873 | NPAS3 | 14 | 33,099,995 | 3874 | NPAS3 | 14 | 33,192,243 |
| 3875 | NPAS3 | 14 | 33,192,848 | 3876 | NPAS3 | 14 | 33,200,625 |
| 3877 | NPAS3 | 14 | 33,206,451 | 3878 | SLC25A21 | 14 | 36,227,370 |
| 3879 | SLC25A21 | 14 | 36,242,267 | 3880 | SLC25A21 | 14 | 36,246,679 |
| 3881 | SLC25A21 | 14 | 36,406,723 | 3882 | SLC25A21 | 14 | 36,411,454 |
| 3883 | SLC25A21 | 14 | 36,411,583 | 3884 | SLC25A21 | 14 | 36,419,219 |
| 3885 | SLC25A21 | 14 | 36,419,536 | 3886 | SLC25A21 | 14 | 36,557,939 |
| 3887 | SLC25A21 | 14 | 36,558,759 | 3888 | SLC25A21 | 14 | 36,657,448 |
| 3889 | SLC25A21 | 14 | 36,664,123 | 3890 | SLC25A21 | 14 | 36,727,597 |
| 3891 | LRFN5 | 14 | 41,011,370 | 3892 | LRFN5 | 14 | 41,019,623 |
| 3893 | LRFN5 | 14 | 41,023,512 | 3894 | LRFN5 | 14 | 41,066,681 |
| 3895 | LRFN5 | 14 | 41,246,521 | 3896 | LRFN5 | 14 | 41,252,963 |
| 3897 | LRFN5 | 14 | 41,299,858 | 3898 | LRFN5 | 14 | 41,357,595 |
| 3899 | LRFN5 | 14 | 41,372,302 | 3900 | LRFN5 | 14 | 41,379,353 |
| 3901 | LRFN5 | 14 | 41,384,489 | 3902 | LRFN5 | 14 | 41,388,962 |
| 3903 | LRFN5 | 14 | 41,389,331 | 3904 | LRFN5 | 14 | 41,484,830 |
| 3905 | GNG2 | 14 | 51,340,131 | 3906 | GNG2 | 14 | 51,340,221 |
| 3907 | GNG2 | 14 | 51,402,742 | 3908 | GNG2 | 14 | 51,409,101 |
| 3909 | GNG2 | 14 | 51,428,644 | 3910 | SAMD4A | 14 | 54,111,220 |
| 3911 | SAMD4A | 14 | 54,112,365 | 3912 | SAMD4A | 14 | 54,113,270 |
| 3913 | SAMD4A | 14 | 54,319,095 | 3914 | SAMD4A | 14 | 54,327,340 |
| 3915 | SAMD4A | 14 | 54,335,279 | 3916 | SAMD4A | 14 | 54,335,321 |
| 3917 | SAMD4A | 14 | 54,373,811 | 3918 | SAMD4A | 14 | 54,375,990 |
| 3919 | SAMD4A | 14 | 54,376,207 | 3920 | PPP2R5E | 14 | 62,856,493 |
| 3921 | PPP2R5E | 14 | 62,858,991 | 3922 | PPP2R5E | 14 | 62,949,791 |
| 3923 | PPP2R5E | 14 | 62,985,912 | 3924 | PPP2R5E | 14 | 62,986,716 |
| 3925 | PPP2R5E | 14 | 63,014,544 | 3926 | PPP2R5E | 14 | 63,044,719 |
| 3927 | PPP2R5E | 14 | 63,091,961 | 3928 | PPP2R5E | 14 | 63,099,534 |
| 3929 | PPP2R5E | 14 | 63,213,578 | 3930 | RGS6 | 14 | 71,459,842 |
| 3931 | RGS6 | 14 | 71,461,797 | 3932 | RGS6 | 14 | 71,524,688 |
| 3933 | RGS6 | 14 | 71,527,435 | 3934 | RGS6 | 14 | 71,532,362 |
| 3935 | RGS6 | 14 | 71,532,447 | 3936 | RGS6 | 14 | 71,730,259 |
| 3937 | RGS6 | 14 | 71,789,160 | 3938 | RGS6 | 14 | 71,802,071 |
| 3939 | RGS6 | 14 | 71,806,722 | 3940 | RGS6 | 14 | 71,850,274 |
| 3941 | RGS6 | 14 | 71,868,756 | 3942 | RGS6 | 14 | 71,872,419 |
| 3943 | RGS6 | 14 | 71,886,146 | 3944 | RGS6 | 14 | 71,886,379 |
| 3945 | RGS6 | 14 | 71,889,437 | 3946 | RGS6 | 14 | 71,896,348 |
| 3947 | RGS6 | 14 | 71,903,671 | 3948 | RGS6 | 14 | 71,904,219 |
| 3949 | RGS6 | 14 | 71,907,687 | 3950 | RGS6 | 14 | 71,921,862 |
| 3951 | RGS6 | 14 | 71,922,573 | 3952 | RGS6 | 14 | 71,925,692 |
| 3953 | RGS6 | 14 | 72,020,234 | 3954 | RGS6 | 14 | 72,129,058 |
| 3955 | NRXN3 | 14 | 77,481,947 | 3956 | NRXN3 | 14 | 79,336,370 |
| 3957 | NRXN3 | 14 | 79,340,786 | 3958 | NRXN3 | 14 | 79,343,602 |
| 3959 | NRXN3 | 14 | 79,403,317 | 3960 | KCNK10 | 14 | 87,720,759 |
| 3961 | KCNK10 | 14 | 87,768,396 | 3962 | KCNK10 | 14 | 87,843,799 |
| 3963 | KCNK10 | 14 | 87,846,012 | 3964 | KCNK10 | 14 | 87,874,519 |
| 3965 | KCNK10 | 14 | 87,881,781 | 3966 | KCNK10 | 14 | 87,887,777 |
| 3967 | KCNK13 | 14 | 89,669,023 | 3968 | KCNK13 | 14 | 89,728,563 |
| 3969 | KCNK13 | 14 | 89,740,891 | 3970 | PSMC1 | 14 | 89,806,078 |
| 3971 | PSMC1 | 14 | 89,810,027 | 3972 | RPS6KA5 | 14 | 90,431,677 |
| 3973 | RPS6KA5 | 14 | 90,501,524 | 3974 | RPS6KA5 | 14 | 90,502,182 |
| 3975 | RPS6KA5 | 14 | 90,527,909 | 3976 | RPS6KA5 | 14 | 90,536,260 |
| 3977 | RPS6KA5 | 14 | 90,572,871 | 3978 | RPS6KA5 | 14 | 90,600,783 |
| 3979 | RPS6KA5 | 14 | 90,600,927 | 3980 | RPS6KA5 | 14 | 90,616,889 |
| 3981 | CCDC88C | 14 | 90,843,247 | 3982 | CCDC88C | 14 | 90,864,783 |
| 3983 | CCDC88C | 14 | 90,916,433 | 3984 | CCDC88C | 14 | 90,918,598 |
| 3985 | CCDC88C | 14 | 90,919,949 | 3986 | CCDC88C | 14 | 90,920,049 |
| 3987 | CCDC88C | 14 | 90,960,430 | 3988 | CCDC88C | 14 | 90,966,287 |
| 3989 | ATXN3 | 14 | 91,603,867 | 3990 | ATXN3 | 14 | 91,606,712 |
| 3991 | ATXN3 | 14 | 91,610,714 | 3992 | ATXN3 | 14 | 91,610,975 |
| 3993 | ATXN3 | 14 | 91,611,093 | 3994 | ATXN3 | 14 | 91,618,538 |
| 3995 | ATXN3 | 14 | 91,621,082 | 3996 | ATXN3 | 14 | 91,621,815 |
| 3997 | ATXN3 | 14 | 91,621,825 | 3998 | BCL11B | 14 | 98,713,688 |
| 3999 | BCL11B | 14 | 98,742,719 | 4000 | BCL11B | 14 | 98,746,376 |
| 4001 | BCL11B | 14 | 98,757,526 | 4002 | BCL11B | 14 | 98,765,857 |
| 4003 | BCL11B | 14 | 98,816,027 | 4004 | MAGEL2 | 15 | 21,460,719 |
| 4005 | ATP10A | 15 | 23,469,206 | 4006 | ATP10A | 15 | 23,471,534 |
| 4007 | ATP10A | 15 | 23,474,886 | 4008 | ATP10A | 15 | 23,476,768 |
| 4009 | ATP10A | 15 | 23,478,440 | 4010 | ATP10A | 15 | 23,486,252 |
| 4011 | ATP10A | 15 | 23,486,388 | 4012 | ATP10A | 15 | 23,493,398 |
| 4013 | ATP10A | 15 | 23,496,935 | 4014 | ATP10A | 15 | 23,497,677 |
| 4015 | ATP10A | 15 | 23,498,058 | 4016 | ATP10A | 15 | 23,504,535 |
| 4017 | ATP10A | 15 | 23,825,206 | 4018 | RYR3 | 15 | 31,385,694 |
| 4019 | RYR3 | 15 | 31,386,142 | 4020 | RYR3 | 15 | 31,397,903 |
| 4021 | RYR3 | 15 | 31,406,234 | 4022 | RYR3 | 15 | 31,410,065 |
| 4023 | RYR3 | 15 | 31,424,553 | 4024 | RYR3 | 15 | 31,507,982 |
| 4025 | RYR3 | 15 | 31,661,043 | 4026 | RYR3 | 15 | 31,701,532 |
| 4027 | RYR3 | 15 | 31,707,341 | 4028 | RYR3 | 15 | 31,716,682 |
| 4029 | RYR3 | 15 | 31,741,944 | 4030 | RYR3 | 15 | 31,744,674 |
| 4031 | RYR3 | 15 | 31,750,983 | 4032 | RYR3 | 15 | 31,815,285 |
| 4033 | RYR3 | 15 | 31,899,901 | 4034 | RYR3 | 15 | 31,900,545 |
| 4035 | RYR3 | 15 | 31,922,164 | 4036 | RYR3 | 15 | 31,926,584 |
| 4037 | C15ORF41 | 15 | 34,692,069 | 4038 | C15ORF41 | 15 | 34,733,595 |
| 4039 | C15ORF41 | 15 | 34,791,082 | 4040 | C15ORF41 | 15 | 34,796,937 |
| 4041 | C15ORF41 | 15 | 34,833,829 | 4042 | C15ORF41 | 15 | 34,863,762 |
| 4043 | C15ORF41 | 15 | 34,863,820 | 4044 | C15ORF41 | 15 | 34,890,144 |
| 4045 | C15ORF41 | 15 | 34,901,333 | 4046 | C15ORF41 | 15 | 34,901,385 |
| 4047 | C15ORF41 | 15 | 34,902,489 | 4048 | MEIS2 | 15 | 34,979,253 |
| 4049 | MEIS2 | 15 | 35,010,253 | 4050 | MEIS2 | 15 | 35,073,394 |
| 4051 | RASGRP1 | 15 | 36,581,858 | 4052 | RASGRP1 | 15 | 36,689,768 |
| 4053 | RASGRP1 | 15 | 36,707,739 | 4054 | RASGRP1 | 15 | 37,051,959 |
| 4055 | GLDN | 15 | 49,444,605 | 4056 | GLDN | 15 | 49,450,678 |
| 4057 | GLDN | 15 | 49,457,033 | 4058 | GLDN | 15 | 49,457,768 |
| 4059 | GLDN | 15 | 49,459,928 | 4060 | GLDN | 15 | 49,460,922 |
| 4061 | GLDN | 15 | 49,461,033 | 4062 | GLDN | 15 | 49,477,064 |
| 4063 | GLDN | 15 | 49,481,784 | 4064 | KIAA1370 | 15 | 50,717,008 |
| 4065 | KIAA1370 | 15 | 50,742,531 | 4066 | KIAA1370 | 15 | 50,746,979 |
| 4067 | CGNL1 | 15 | 55,403,598 | 4068 | CGNL1 | 15 | 55,423,011 |
| 4069 | CGNL1 | 15 | 55,516,581 | 4070 | CGNL1 | 15 | 55,518,865 |
| 4071 | CGNL1 | 15 | 55,520,686 | 4072 | CGNL1 | 15 | 55,521,306 |
| 4073 | CGNL1 | 15 | 55,527,416 | 4074 | CGNL1 | 15 | 55,627,080 |
| 4075 | CGNL1 | 15 | 55,627,123 | 4076 | CGNL1 | 15 | 55,632,176 |
| 4077 | CGNL1 | 15 | 55,633,731 | 4078 | RORA | 15 | 58,605,378 |
| 4079 | RORA | 15 | 58,680,723 | 4080 | RORA | 15 | 58,710,721 |
| 4081 | RORA | 15 | 58,718,548 | 4082 | RORA | 15 | 58,721,610 |
| 4083 | RORA | 15 | 59,614,183 | 4084 | CLK3 | 15 | 72,697,052 |
| 4085 | CLK3 | 15 | 72,702,941 | 4086 | CLK3 | 15 | 72,707,585 |
| 4087 | CLK3 | 15 | 72,727,323 | 4088 | TBC1D2B | 15 | 75,981,714 |
| 4089 | TBC1D2B | 15 | 76,076,030 | 4090 | TBC1D2B | 15 | 76,083,890 |
| 4091 | TBC1D2B | 15 | 76,096,608 | 4092 | TBC1D2B | 15 | 76,098,398 |
| 4093 | TBC1D2B | 15 | 76,121,710 | 4094 | TBC1D2B | 15 | 76,124,994 |
| 4095 | TBC1D2B | 15 | 76,150,830 | 4096 | TBC1D2B | 15 | 76,157,798 |
| 4097 | TBC1D2B | 15 | 76,168,715 | 4098 | TBC1D2B | 15 | 76,170,084 |
| 4099 | ARNT2 | 15 | 78,539,124 | 4100 | ARNT2 | 15 | 78,542,039 |
| 4101 | ARNT2 | 15 | 78,566,813 | 4102 | ARNT2 | 15 | 78,700,178 |
| 4103 | ARNT2 | 15 | 78,704,322 | 4104 | ARNT2 | 15 | 78,713,205 |
| 4105 | ARNT2 | 15 | 78,718,605 | 4106 | SH3GL3 | 15 | 81,924,484 |
| 4107 | SH3GL3 | 15 | 82,039,470 | 4108 | SH3GL3 | 15 | 82,089,602 |
| 4109 | PCSK6 | 15 | 99,687,851 | 4110 | PCSK6 | 15 | 99,842,741 |
| 4111 | PCSK6 | 15 | 99,970,111 | 4112 | A2BP1 | 16 | 6,521,767 |
| 4113 | A2BP1 | 16 | 6,523,126 | 4114 | A2BP1 | 16 | 6,526,273 |
| 4115 | A2BP1 | 16 | 6,528,853 | 4116 | A2BP1 | 16 | 6,531,472 |
| 4117 | A2BP1 | 16 | 6,676,476 | 4118 | A2BP1 | 16 | 6,691,358 |
| 4119 | A2BP1 | 16 | 6,963,875 | 4120 | A2BP1 | 16 | 6,970,310 |
| 4121 | A2BP1 | 16 | 6,974,269 | 4122 | A2BP1 | 16 | 6,980,934 |
| 4123 | A2BP1 | 16 | 7,223,623 | 4124 | A2BP1 | 16 | 7,223,826 |
| 4125 | A2BP1 | 16 | 7,224,553 | 4126 | A2BP1 | 16 | 7,226,822 |
| 4127 | A2BP1 | 16 | 7,234,640 | 4128 | A2BP1 | 16 | 7,247,111 |
| 4129 | A2BP1 | 16 | 7,253,357 | 4130 | A2BP1 | 16 | 7,435,187 |
| 4131 | A2BP1 | 16 | 7,551,379 | 4132 | A2BP1 | 16 | 7,556,763 |
| 4133 | A2BP1 | 16 | 7,560,608 | 4134 | A2BP1 | 16 | 7,629,108 |
| 4135 | A2BP1 | 16 | 7,630,072 | 4136 | A2BP1 | 16 | 7,632,187 |
| 4137 | A2BP1 | 16 | 7,633,275 | 4138 | A2BP1 | 16 | 7,700,000 |
| 4139 | TMC5 | 16 | 19,254,444 | 4140 | TMC5 | 16 | 19,311,395 |
| 4141 | TMC5 | 16 | 19,321,487 | 4142 | TMC5 | 16 | 19,413,314 |
| 4143 | GDE1 | 16 | 19,455,004 | 4144 | EEF2K | 16 | 22,107,225 |
| 4145 | EEF2K | 16 | 22,114,775 | 4146 | EEF2K | 16 | 22,169,198 |
| 4147 | EEF2K | 16 | 22,170,015 | 4148 | EEF2K | 16 | 22,249,604 |
| 4149 | KIFC3 | 16 | 56,410,585 | 4150 | HYDIN | 16 | 69,818,152 |
| 4151 | WWOX | 16 | 76,643,771 | 4152 | WWOX | 16 | 76,655,506 |
| 4153 | WWOX | 16 | 76,672,696 | 4154 | WWOX | 16 | 76,673,124 |
| 4155 | WWOX | 16 | 76,674,781 | 4156 | WWOX | 16 | 76,691,956 |
| 4157 | WWOX | 16 | 77,016,847 | 4158 | WWOX | 16 | 77,024,259 |
| 4159 | WWOX | 16 | 77,041,675 | 4160 | WWOX | 16 | 77,045,378 |
| 4161 | PLCG2 | 16 | 80,379,032 | 4162 | MPHOSPH6 | 16 | 80,705,905 |
| 4163 | MPHOSPH6 | 16 | 80,722,907 | 4164 | MPHOSPH6 | 16 | 80,723,078 |
| 4165 | MPHOSPH6 | 16 | 80,728,226 | 4166 | MPHOSPH6 | 16 | 80,728,868 |
| 4167 | MPHOSPH6 | 16 | 80,737,839 | 4168 | MPHOSPH6 | 16 | 80,744,073 |
| 4169 | MPHOSPH6 | 16 | 80,750,997 | 4170 | MPHOSPH6 | 16 | 80,757,604 |
| 4171 | MPHOSPH6 | 16 | 80,759,877 | 4172 | MPHOSPH6 | 16 | 80,765,783 |
| 4173 | MPHOSPH6 | 16 | 80,787,893 | 4174 | MPHOSPH6 | 16 | 80,815,052 |
| 4175 | MPHOSPH6 | 16 | 80,815,095 | 4176 | MPHOSPH6 | 16 | 80,817,367 |
| 4177 | MPHOSPH6 | 16 | 80,820,057 | 4178 | MPHOSPH6 | 16 | 80,831,050 |
| 4179 | MPHOSPH6 | 16 | 80,831,708 | 4180 | MPHOSPH6 | 16 | 80,833,378 |
| 4181 | MPHOSPH6 | 16 | 80,833,755 | 4182 | CDH13 | 16 | 81,340,088 |
| 4183 | CDH13 | 16 | 81,348,352 | 4184 | CDH13 | 16 | 81,374,752 |
| 4185 | CDH13 | 16 | 81,380,017 | 4186 | CDH13 | 16 | 81,390,450 |
| 4187 | CDH13 | 16 | 81,443,634 | 4188 | CDH13 | 16 | 81,464,521 |
| 4189 | CDH13 | 16 | 81,470,072 | 4190 | CDH13 | 16 | 81,813,878 |
| 4191 | CDH13 | 16 | 81,884,064 | 4192 | CDH13 | 16 | 81,887,115 |
| 4193 | CDH13 | 16 | 81,888,111 | 4194 | CDH13 | 16 | 81,898,337 |
| 4195 | CDH13 | 16 | 81,899,890 | 4196 | CDH13 | 16 | 81,917,154 |
| 4197 | CDH13 | 16 | 81,919,816 | 4198 | CDH13 | 16 | 81,925,901 |
| 4199 | CDH13 | 16 | 81,931,464 | 4200 | CDH13 | 16 | 81,933,244 |
| 4201 | CDH13 | 16 | 82,194,302 | 4202 | CDH13 | 16 | 82,357,323 |
| 4203 | CDH13 | 16 | 82,394,233 | 4204 | CDH13 | 16 | 82,410,620 |
| 4205 | CDH13 | 16 | 82,420,137 | 4206 | USP10 | 16 | 83,305,397 |
| 4207 | USP10 | 16 | 83,311,158 | 4208 | USP10 | 16 | 83,325,736 |
| 4209 | USP10 | 16 | 83,328,544 | 4210 | USP10 | 16 | 83,331,937 |
| 4211 | USP10 | 16 | 83,371,654 | 4212 | CRISPLD2 | 16 | 83,443,531 |
| 4213 | CRISPLD2 | 16 | 83,475,493 | 4214 | CRISPLD2 | 16 | 83,480,748 |
| 4215 | CRISPLD2 | 16 | 83,495,998 | 4216 | CRISPLD2 | 16 | 83,497,517 |
| 4217 | CRISPLD2 | 16 | 83,540,736 | 4218 | ALOX12B | 17 | 7,981,019 |
| 4219 | GAS7 | 17 | 9,808,904 | 4220 | DNAH9 | 17 | 11,444,122 |
| 4221 | DNAH9 | 17 | 11,650,220 | 4222 | DNAH9 | 17 | 11,662,069 |
| 4223 | DNAH9 | 17 | 11,715,142 | 4224 | RAB11FIP4 | 17 | 26,746,745 |
| 4225 | RAB11FIP4 | 17 | 27,005,299 | 4226 | CA10 | 17 | 47,089,473 |
| 4227 | CA10 | 17 | 47,092,582 | 4228 | CA10 | 17 | 47,092,738 |
| 4229 | CA10 | 17 | 47,098,311 | 4230 | CA10 | 17 | 47,099,992 |
| 4231 | CA10 | 17 | 47,382,993 | 4232 | CA10 | 17 | 47,412,115 |
| 4233 | CA10 | 17 | 47,427,244 | 4234 | CA10 | 17 | 47,434,848 |
| 4235 | CA10 | 17 | 47,435,142 | 4236 | CA10 | 17 | 47,453,436 |
| 4237 | CA10 | 17 | 47,528,183 | 4238 | CA10 | 17 | 47,531,938 |
| 4239 | CA10 | 17 | 47,547,164 | 4240 | CA10 | 17 | 47,566,855 |
| 4241 | CA10 | 17 | 47,599,744 | 4242 | CA10 | 17 | 47,674,724 |
| 4243 | CA10 | 17 | 47,675,666 | 4244 | CA10 | 17 | 48,115,311 |
| 4245 | CA10 | 17 | 48,122,155 | 4246 | CA10 | 17 | 48,191,994 |
| 4247 | CA10 | 17 | 48,209,418 | 4248 | CA10 | 17 | 48,233,607 |
| 4249 | CA10 | 17 | 48,242,213 | 4250 | CA10 | 17 | 48,243,428 |
| 4251 | CA10 | 17 | 48,264,257 | 4252 | CA10 | 17 | 48,275,354 |
| 4253 | CA10 | 17 | 48,292,028 | 4254 | CA10 | 17 | 48,292,853 |
| 4255 | MSI2 | 17 | 52,558,314 | 4256 | MSI2 | 17 | 52,773,732 |
| 4257 | MSI2 | 17 | 52,817,244 | 4258 | MSI2 | 17 | 53,002,826 |
| 4259 | MSI2 | 17 | 53,007,065 | 4260 | MSI2 | 17 | 53,093,648 |
| 4261 | CACNG4 | 17 | 62,462,327 | 4262 | SDK2 | 17 | 68,829,410 |
| 4263 | SDK2 | 17 | 68,954,425 | 4264 | DNAH17 | 17 | 73,942,963 |
| 4265 | DNAH17 | 17 | 73,950,638 | 4266 | DNAH17 | 17 | 73,950,704 |
| 4267 | DNAH17 | 17 | 73,954,236 | 4268 | DNAH17 | 17 | 73,990,984 |
| 4269 | DNAH17 | 17 | 74,017,503 | 4270 | DNAH17 | 17 | 74,071,124 |
| 4271 | HRNBP3 | 17 | 74,776,568 | 4272 | HRNBP3 | 17 | 74,845,144 |
| 4273 | HRNBP3 | 17 | 74,857,410 | 4274 | HRNBP3 | 17 | 75,313,214 |
| 4275 | TGIF1 | 18 | 3,319,448 | 4276 | DLGAP1 | 18 | 3,829,680 |
| 4277 | DLGAP1 | 18 | 3,838,826 | 4278 | DLGAP1 | 18 | 3,840,002 |
| 4279 | DLGAP1 | 18 | 3,927,944 | 4280 | ZFP161 | 18 | 5,251,246 |
| 4281 | ZFP161 | 18 | 5,269,052 | 4282 | ZFP161 | 18 | 5,280,198 |
| 4283 | ZFP161 | 18 | 5,283,943 | 4284 | ZFP161 | 18 | 5,284,323 |
| 4285 | ZFP161 | 18 | 5,398,997 | 4286 | ZFP161 | 18 | 5,399,208 |
| 4287 | PTPRM | 18 | 7,523,566 | 4288 | PTPRM | 18 | 7,563,510 |
| 4289 | PTPRM | 18 | 7,571,167 | 4290 | PTPRM | 18 | 7,585,927 |
| 4291 | PTPRM | 18 | 7,598,911 | 4292 | PTPRM | 18 | 7,599,137 |
| 4293 | PTPRM | 18 | 7,892,147 | 4294 | PTPRM | 18 | 8,000,444 |
| 4295 | PTPRM | 18 | 8,040,886 | 4296 | PTPRM | 18 | 8,042,261 |
| 4297 | PTPRM | 18 | 8,059,868 | 4298 | PTPRM | 18 | 8,068,553 |
| 4299 | PTPRM | 18 | 8,086,608 | 4300 | PTPRM | 18 | 8,087,133 |
| 4301 | PTPRM | 18 | 8,288,088 | 4302 | PTPRM | 18 | 8,288,633 |
| 4303 | PTPRM | 18 | 8,377,680 | 4304 | KIAA0802 | 18 | 8,839,087 |
| 4305 | KIAA0802 | 18 | 8,840,062 | 4306 | KIAA0802 | 18 | 8,844,132 |
| 4307 | KIAA0802 | 18 | 8,884,977 | 4308 | OSBPL1A | 18 | 20,006,364 |
| 4309 | OSBPL1A | 18 | 20,042,294 | 4310 | OSBPL1A | 18 | 20,093,929 |
| 4311 | CHST9 | 18 | 22,804,050 | 4312 | CHST9 | 18 | 22,854,839 |
| 4313 | CHST9 | 18 | 22,874,628 | 4314 | CHST9 | 18 | 22,886,548 |
| 4315 | CHST9 | 18 | 22,965,754 | 4316 | CHST9 | 18 | 23,010,213 |
| 4317 | CHST9 | 18 | 23,012,354 | 4318 | LOXHD1 | 18 | 42,342,838 |
| 4319 | LOXHD1 | 18 | 42,382,501 | 4320 | NEDD4L | 18 | 54,010,852 |
| 4321 | NEDD4L | 18 | 54,013,845 | 4322 | NEDD4L | 18 | 54,039,159 |
| 4323 | NEDD4L | 18 | 54,047,200 | 4324 | NEDD4L | 18 | 54,095,115 |
| 4325 | NEDD4L | 18 | 54,100,941 | 4326 | NEDD4L | 18 | 54,155,894 |
| 4327 | NEDD4L | 18 | 54,165,956 | 4328 | NEDD4L | 18 | 54,173,333 |
| 4329 | NEDD4L | 18 | 54,179,311 | 4330 | NEDD4L | 18 | 54,188,829 |
| 4331 | NEDD4L | 18 | 54,202,520 | 4332 | NEDD4L | 18 | 54,202,587 |
| 4333 | NEDD4L | 18 | 54,238,628 | 4334 | NEDD4L | 18 | 54,250,387 |
| 4335 | NEDD4L | 18 | 54,259,246 | 4336 | CCBE1 | 18 | 55,220,303 |
| 4337 | CCBE1 | 18 | 55,241,702 | 4338 | CCBE1 | 18 | 55,332,724 |
| 4339 | CCBE1 | 18 | 55,333,626 | 4340 | CCBE1 | 18 | 55,372,586 |
| 4341 | CCBE1 | 18 | 55,372,710 | 4342 | CCBE1 | 18 | 55,372,725 |
| 4343 | CCBE1 | 18 | 55,375,168 | 4344 | CCBE1 | 18 | 55,377,089 |
| 4345 | CCBE1 | 18 | 55,494,237 | 4346 | CCBE1 | 18 | 55,507,128 |
| 4347 | CCBE1 | 18 | 55,510,412 | 4348 | CDH20 | 18 | 57,031,422 |
| 4349 | CDH7 | 18 | 61,289,294 | 4350 | CDH7 | 18 | 61,305,341 |
| 4351 | CDH7 | 18 | 61,305,944 | 4352 | CDH7 | 18 | 61,316,783 |
| 4353 | CDH7 | 18 | 61,469,322 | 4354 | CDH7 | 18 | 61,566,553 |
| 4355 | CDH7 | 18 | 61,586,240 | 4356 | CDH7 | 18 | 61,590,121 |
| 4357 | CDH7 | 18 | 61,595,280 | 4358 | CDH7 | 18 | 61,595,696 |
| 4359 | CDH7 | 18 | 61,626,782 | 4360 | CDH7 | 18 | 61,668,497 |
| 4361 | CDH7 | 18 | 61,690,373 | 4362 | CDH7 | 18 | 61,691,931 |
| 4363 | CDH7 | 18 | 61,693,003 | 4364 | CDH7 | 18 | 61,697,352 |
| 4365 | CDH7 | 18 | 61,697,973 | 4366 | CDH7 | 18 | 61,716,015 |
| 4367 | CDH7 | 18 | 61,716,853 | 4368 | CDH7 | 18 | 61,736,852 |
| 4369 | CDH7 | 18 | 61,739,825 | 4370 | TXNDC10 | 18 | 64,477,750 |
| 4371 | TXNDC10 | 18 | 64,483,360 | 4372 | TXNDC10 | 18 | 64,483,488 |
| 4373 | TXNDC10 | 18 | 64,536,945 | 4374 | DOK6 | 18 | 65,224,346 |
| 4375 | DOK6 | 18 | 65,312,795 | 4376 | DOK6 | 18 | 65,312,915 |
| 4377 | DOK6 | 18 | 65,324,331 | 4378 | DOK6 | 18 | 65,437,835 |
| 4379 | DOK6 | 18 | 65,452,233 | 4380 | DOK6 | 18 | 65,453,592 |
| 4381 | DOK6 | 18 | 65,637,817 | 4382 | DOK6 | 18 | 65,649,653 |
| 4383 | MBP | 18 | 72,823,708 | 4384 | LDLR | 19 | 11,102,877 |
| 4385 | LDLR | 19 | 11,163,807 | 4386 | ZNF667 | 19 | 61,678,984 |
| 4387 | ZNF667 | 19 | 61,723,565 | 4388 | ZNF544 | 19 | 63,458,980 |
| 4389 | ZNF544 | 19 | 63,476,544 | 4390 | ATRN | 20 | 3,443,074 |
| 4391 | ATRN | 20 | 3,560,688 | 4392 | ATRN | 20 | 3,587,019 |
| 4393 | RNF24 | 20 | 3,882,766 | 4394 | RNF24 | 20 | 3,941,491 |
| 4395 | RNF24 | 20 | 4,034,314 | 4396 | PRNT | 20 | 4,659,767 |
| 4397 | PRNT | 20 | 4,665,262 | 4398 | PRNT | 20 | 4,667,344 |
| 4399 | PRNT | 20 | 4,667,407 | 4400 | PRNT | 20 | 4,676,075 |
| 4401 | PRNT | 20 | 4,678,559 | 4402 | PRNT | 20 | 4,678,670 |
| 4403 | PRNT | 20 | 4,679,022 | 4404 | PRNT | 20 | 4,679,142 |
| 4405 | PRNT | 20 | 4,690,080 | 4406 | PRNT | 20 | 4,690,705 |
| 4407 | PRNT | 20 | 4,690,937 | 4408 | FERMT1 | 20 | 6,003,038 |
| 4409 | FERMT1 | 20 | 6,037,797 | 4410 | FERMT1 | 20 | 6,048,088 |
| 4411 | FERMT1 | 20 | 6,162,234 | 4412 | PLCB1 | 20 | 8,000,158 |
| 4413 | PLCB1 | 20 | 8,001,312 | 4414 | PLCB1 | 20 | 8,082,140 |
| 4415 | PLCB1 | 20 | 8,092,135 | 4416 | PLCB1 | 20 | 8,159,200 |
| 4417 | PLCB1 | 20 | 8,166,965 | 4418 | PLCB1 | 20 | 8,185,056 |
| 4419 | PLCB1 | 20 | 8,186,289 | 4420 | PLCB1 | 20 | 8,195,326 |
| 4421 | PLCB1 | 20 | 8,322,803 | 4422 | PLCB1 | 20 | 8,677,119 |
| 4423 | PLCB1 | 20 | 8,691,637 | 4424 | PLCB1 | 20 | 8,710,195 |
| 4425 | PLCB1 | 20 | 8,713,736 | 4426 | PLCB1 | 20 | 8,714,952 |
| 4427 | PLCB1 | 20 | 8,756,294 | 4428 | PLCB1 | 20 | 8,759,482 |
| 4429 | PLCB1 | 20 | 8,761,509 | 4430 | PLCB1 | 20 | 8,761,544 |
| 4431 | PLCB1 | 20 | 8,794,006 | 4432 | PLCB1 | 20 | 8,824,090 |
| 4433 | PLCB1 | 20 | 8,837,613 | 4434 | PLCB4 | 20 | 8,837,897 |
| 4435 | PLCB1 | 20 | 8,842,975 | 4436 | PLCB4 | 20 | 8,846,570 |
| 4437 | PLCB4 | 20 | 9,313,241 | 4438 | PLCB4 | 20 | 9,433,807 |
| 4439 | JAG1 | 20 | 10,589,470 | 4440 | JAG1 | 20 | 10,589,575 |
| 4441 | MACROD2 | 20 | 14,218,096 | 4442 | MACROD2 | 20 | 14,242,180 |
| 4443 | MACROD2 | 20 | 14,265,679 | 4444 | MACROD2 | 20 | 14,275,899 |
| 4445 | MACROD2 | 20 | 15,066,513 | 4446 | MACROD2 | 20 | 15,068,323 |
| 4447 | MACROD2 | 20 | 15,073,972 | 4448 | MACROD2 | 20 | 15,085,117 |
| 4449 | MACROD2 | 20 | 15,087,547 | 4450 | MACROD2 | 20 | 15,094,357 |
| 4451 | MACROD2 | 20 | 15,557,292 | 4452 | MACROD2 | 20 | 15,559,316 |
| 4453 | MACROD2 | 20 | 15,780,282 | 4454 | MACROD2 | 20 | 15,839,419 |
| 4455 | MACROD2 | 20 | 15,846,812 | 4456 | MACROD2 | 20 | 15,890,876 |
| 4457 | MACROD2 | 20 | 15,908,144 | 4458 | MACROD2 | 20 | 15,943,358 |
| 4459 | MACROD2 | 20 | 15,981,022 | 4460 | MACROD2 | 20 | 15,993,679 |
| 4461 | KIF16B | 20 | 16,199,083 | 4462 | KIF16B | 20 | 16,221,665 |
| 4463 | KIF16B | 20 | 16,270,199 | 4464 | KIF16B | 20 | 16,273,140 |
| 4465 | KIF16B | 20 | 16,275,825 | 4466 | KIF16B | 20 | 16,288,458 |
| 4467 | KIF16B | 20 | 16,288,836 | 4468 | KIF16B | 20 | 16,293,233 |
| 4469 | KIF16B | 20 | 16,294,439 | 4470 | KIF16B | 20 | 16,294,523 |
| 4471 | KIF16B | 20 | 16,301,934 | 4472 | KIF16B | 20 | 16,307,567 |
| 4473 | KIF16B | 20 | 16,314,615 | 4474 | KIF16B | 20 | 16,371,330 |
| 4475 | KIF16B | 20 | 16,395,367 | 4476 | KIF16B | 20 | 16,435,785 |
| 4477 | KIF16B | 20 | 16,436,083 | 4478 | KIF16B | 20 | 16,442,919 |
| 4479 | KIF16B | 20 | 16,445,469 | 4480 | KIF16B | 20 | 16,454,298 |
| 4481 | KIF16B | 20 | 16,454,369 | 4482 | KIF16B | 20 | 16,459,991 |
| 4483 | KIF16B | 20 | 16,476,914 | 4484 | KIF16B | 20 | 16,591,934 |
| 4485 | SEC23B | 20 | 18,435,014 | 4486 | SEC23B | 20 | 18,454,825 |
| 4487 | SEC23B | 20 | 18,470,933 | 4488 | SEC23B | 20 | 18,471,002 |
| 4489 | SEC23B | 20 | 18,517,599 | 4490 | MAPRE1 | 20 | 30,888,730 |
| 4491 | MAPRE1 | 20 | 30,891,296 | 4492 | PTPRT | 20 | 40,069,405 |
| 4493 | PTPRT | 20 | 40,087,340 | 4494 | PTPRT | 20 | 40,104,368 |
| 4495 | PTPRT | 20 | 40,111,844 | 4496 | PTPRT | 20 | 40,141,351 |
| 4497 | PTPRT | 20 | 40,141,648 | 4498 | PTPRT | 20 | 40,143,404 |
| 4499 | PTPRT | 20 | 40,151,573 | 4500 | PTPRT | 20 | 40,153,367 |
| 4501 | PTPRT | 20 | 40,176,580 | 4502 | PTPRT | 20 | 40,353,349 |
| 4503 | PTPRT | 20 | 40,525,385 | 4504 | PTPRT | 20 | 40,541,070 |
| 4505 | PTPRT | 20 | 40,715,840 | 4506 | PTPRT | 20 | 40,724,350 |
| 4507 | PTPRT | 20 | 40,745,754 | 4508 | PTPRT | 20 | 40,759,541 |
| 4509 | PTPRT | 20 | 40,759,651 | 4510 | PTPRT | 20 | 40,766,955 |
| 4511 | PTPRT | 20 | 40,781,649 | 4512 | PTPRT | 20 | 40,832,585 |
| 4513 | PTPRT | 20 | 41,380,590 | 4514 | PTPRT | 20 | 41,380,842 |
| 4515 | PTPRT | 20 | 41,381,326 | 4516 | ZSWIM3 | 20 | 43,929,395 |
| 4517 | KCNB1 | 20 | 47,457,043 | 4518 | KCNB1 | 20 | 47,468,865 |
| 4519 | KCNB1 | 20 | 47,543,084 | 4520 | KCNB1 | 20 | 47,550,362 |
| 4521 | KCNB1 | 20 | 47,554,184 | 4522 | PTGIS | 20 | 47,563,735 |
| 4523 | PTGIS | 20 | 47,596,551 | 4524 | SNAI1 | 20 | 48,025,165 |
| 4525 | SNAI1 | 20 | 48,034,331 | 4526 | SNAI1 | 20 | 48,036,030 |
| 4527 | SNAI1 | 20 | 48,038,206 | 4528 | SNAI1 | 20 | 48,051,852 |
| 4529 | CDH4 | 20 | 59,287,591 | 4530 | CDH4 | 20 | 59,359,672 |
| 4531 | CDH4 | 20 | 59,410,397 | 4532 | CDH4 | 20 | 59,411,482 |
| 4533 | CDH4 | 20 | 59,456,145 | 4534 | CDH4 | 20 | 59,516,281 |
| 4535 | CDH4 | 20 | 59,708,754 | 4536 | CDH4 | 20 | 59,854,564 |
| 4537 | CDH4 | 20 | 59,923,377 | 4538 | CDH4 | 20 | 59,936,745 |
| 4539 | CDH4 | 20 | 59,972,047 | 4540 | C21ORF37 | 21 | 17,711,037 |
| 4541 | C21ORF37 | 21 | 17,738,145 | 4542 | NCAM2 | 21 | 20,822,764 |
| 4543 | NCAM2 | 21 | 20,823,179 | 4544 | NCAM2 | 21 | 21,399,247 |
| 4545 | NCAM2 | 21 | 21,668,058 | 4546 | NCAM2 | 21 | 21,717,043 |
| 4547 | NCAM2 | 21 | 21,722,038 | 4548 | NCAM2 | 21 | 21,734,222 |
| 4549 | NCAM2 | 21 | 21,757,884 | 4550 | NCAM2 | 21 | 21,763,517 |
| 4551 | NCAM2 | 21 | 21,791,467 | 4552 | NCAM2 | 21 | 21,849,510 |
| 4553 | MIRN155 | 21 | 24,246,806 | 4554 | MIRN155 | 21 | 24,492,909 |
| 4555 | MIRN155 | 21 | 24,857,632 | 4556 | PCP4 | 21 | 40,147,412 |
| 4557 | PCP4 | 21 | 40,194,909 | 4558 | PCP4 | 21 | 40,196,193 |
| 4559 | PCP4 | 21 | 40,196,614 | 4560 | SLC37A1 | 21 | 42,871,651 |
| 4561 | PDE9A | 21 | 42,977,018 | 4562 | PDE9A | 21 | 42,997,501 |
| 4563 | PDE9A | 21 | 42,998,397 | 4564 | PDE9A | 21 | 43,012,117 |
| 4565 | PDE9A | 21 | 43,061,181 | 4566 | PDE9A | 21 | 43,101,819 |
| 4567 | ARVCF | 22 | 18,342,380 | 4568 | ARVCF | 22 | 18,343,666 |
| 4569 | ARVCF | 22 | 18,358,558 | 4570 | ARVCF | 22 | 18,376,255 |
| 4571 | SGSM1 | 22 | 23,675,537 | 4572 | ASPHD2 | 22 | 25,130,199 |
| 4573 | ASPHD2 | 22 | 25,171,643 | 4574 | HPS4 | 22 | 25,200,502 |
| 4575 | HPS4 | 22 | 25,207,539 | 4576 | HPS4 | 22 | 25,207,981 |
| 4577 | HPS4 | 22 | 25,208,024 | 4578 | ARFGAP3 | 22 | 41,526,978 |
| 4579 | ARFGAP3 | 22 | 41,542,725 | 4580 | ARFGAP3 | 22 | 41,556,543 |
| 4581 | ARFGAP3 | 22 | 41,562,917 | 4582 | ARFGAP3 | 22 | 41,590,371 |
| 4583 | ARFGAP3 | 22 | 41,591,167 | 4584 | PACSIN2 | 22 | 41,617,234 |
| 4585 | PACSIN2 | 22 | 41,619,417 | 4586 | PACSIN2 | 22 | 41,635,805 |
| 4587 | PACSIN2 | 22 | 41,679,576 | 4588 | PACSIN2 | 22 | 41,722,800 |
| 4589 | PACSIN2 | 22 | 41,727,507 | 4590 | PACSIN2 | 22 | 41,765,612 |
| 4591 | TTLL1 | 22 | 41,776,832 | 4592 | TTLL1 | 22 | 41,789,790 |
| 4593 | TTLL1 | 22 | 41,800,470 | 4594 | TTLL1 | 22 | 41,822,583 |
| 4595 | TTLL1 | 22 | 41,822,906 | 4596 | EFCAB6 | 22 | 42,262,997 |
| 4597 | EFCAB6 | 22 | 42,278,436 | 4598 | EFCAB6 | 22 | 42,307,729 |
| 4599 | EFCAB6 | 22 | 42,320,777 | 4600 | EFCAB6 | 22 | 42,341,477 |
| 4601 | EFCAB6 | 22 | 42,354,506 | 4602 | EFCAB6 | 22 | 42,358,549 |
| 4603 | EFCAB6 | 22 | 42,364,511 | 4604 | EFCAB6 | 22 | 42,387,277 |
| 4605 | EFCAB6 | 22 | 42,411,013 | 4606 | EFCAB6 | 22 | 42,414,775 |
| 4607 | EFCAB6 | 22 | 42,426,302 | 4608 | EFCAB6 | 22 | 42,433,349 |
| 4609 | EFCAB6 | 22 | 42,451,208 | 4610 | EFCAB6 | 22 | 42,494,726 |
| 4611 | EFCAB6 | 22 | 42,496,931 | 4612 | EFCAB6 | 22 | 42,500,759 |
| 4613 | EFCAB6 | 22 | 42,521,911 | 4614 | EFCAB6 | 22 | 42,527,300 |
| 4615 | EFCAB6 | 22 | 42,584,422 | 4616 | RIBC2 | 22 | 44,257,735 |
| 4617 | RIBC2 | 22 | 44,258,667 | | | | |

The application's sequence listing, which the Patent Office published only in electronic form, follows.

SEQUENCE LISTING (4617 sequences)

SEQ ID NO: 1 - DNA, 61 bp, Homo Sapiens
cacatacaaagcagcttgggacagcacctcrgctgccccaccagagaactctctcaggatt

SEQ ID NO: 2 - DNA, 61 bp, Homo Sapiens
aaataaatgggaaagtgaggaatcagtcgartaattttatggagcaaaggaaaaaaaaggt

SEQ ID NO: 3 - DNA, 61 bp, Homo Sapiens
ctaaaatagccacttctaccactttcactgygatcttttatctcctaacccggctttattt

SEQ ID NO: 4 - DNA, 61 bp, Homo Sapiens
cagcaaaggtaggcaaagagcaaaacagatkaaagaaggaacctgggcatcagtaaggcag

SEQ ID NO: 5 - DNA, 61 bp, Homo Sapiens
aatgaaaacacatagtgcctctatgagtccrtattgagtcaagtgttcttagaggttttca

SEQ ID NO: 6 - DNA, 61 bp, Homo Sapiens
tgaaagggaagtggcattatttcatctgatktaatgttcatttgcagttatttttgttata

SEQ ID NO: 7 - DNA, 61 bp, Homo Sapiens
gcttcttctagaaaagacaataaagctttgsaaccttctttccacttaccattcactagaa

SEQ ID NO: 8 - DNA, 61 bp, Homo Sapiens
ctccccgccaacgcacctggtctttttctgsaattcaagcaggtggctcagagaccaccac

SEQ ID NO: 9 - DNA, 61 bp, Homo Sapiens
caggctgggaatgaggggtgccatggccgawcttcatcccaaaacacatgagggtctcagg

SEQ ID NO: 10 - DNA, 61 bp, Homo Sapiens
ttgggatttcagaagctaaaaggaagctcayagactccaacaccctcattatgctggggga

SEQ ID NO: 11 - DNA, 61 bp, Homo Sapiens
taaagattcagtttttgtgttgtcttggtcrttagcctggcagagtccagcccagaggtgg

SEQ ID NO: 12 - DNA, 61 bp, Homo Sapiens
tggacactgggccaggagctcagatccctcmgtccttaggccatacctggtgtctccagct

SEQ ID NO: 13 - DNA, 61 bp, Homo Sapiens
cattggatttcaaagcttgctttttctgttsgttcttctctctccttctctctctgtctct

SEQ ID NO: 14 - DNA, 61 bp, Homo Sapiens
gcatagtgaaagccgctcaccactggcttargaaactcccgggaggcagttgcaaagcttt

SEQ ID NO: 15 - DNA, 61 bp, Homo Sapiens
atgcagggtgggcataggagaatttacaagscctttacctctaagcctctgcagtttgttt

SEQ ID NO: 16 - DNA, 61 bp, Homo Sapiens
ctgaggtattctcaagttctagaaccacggycttaatgattacccttgaaaagtcactata

SEQ ID NO: 17 - DNA, 61 bp, Homo Sapiens
cctcacaccatcctgtgagattaagcgttcytatcatccccgttttacagaggggaaaacc

SEQ ID NO: 18 - DNA, 61 bp, Homo Sapiens
ccccctggcagggcctccagcgtcacgcggrcaggaaaggaggagaacagcagcggtctca

SEQ ID NO: 19 - DNA, 61 bp, Homo Sapiens
catctaaaaacagcagctattactaagtgargatctactttgtgctgggctccaagctgct

SEQ ID NO: 20 - DNA, 61 bp, Homo Sapiens
catttaatcctcacaaggaccctgtgacagmaagtactgttgtatatgaagaagctgaggc

SEQ ID NO: 21 - DNA, 61 bp, Homo Sapiens
agaggatttaaaatccaactttaccattcaygtgctgtgtcacctggagccaattacttaa

SEQ ID NO: 22 - DNA, 61 bp, Homo Sapiens
agtgctgggattgattagcagtgcctgccayggataagggaatggaaagtgacagcctgca

SEQ ID NO: 23 - DNA, 61 bp, Homo Sapiens
tggcatctgacaaacgtttccgggcccttcygctctcagctcagatatcaacctctctagc

SEQ ID NO: 24 - DNA, 61 bp, Homo Sapiens
tgatttttttcaatccacaggaccagaacamggcctggtatatagtaggtcatcattaaag

SEQ ID NO: 25 - DNA, 61 bp, Homo Sapiens
ggtgaggtaggcaggtcagaaattgttcttytcttttagcagatgggcatactgaggcttt

SEQ ID NO: 26 - DNA, 61 bp, Homo Sapiens
attcaaaggtctatgactgtttacttatacrtggctctatggaatacacaatgacaagcac

SEQ ID NO: 27 - DNA, 61 bp, Homo Sapiens
cagaatttcatcctggctaacaaactcatascaaattaggctctctgacattggattattt

SEQ ID NO: 28 - DNA, 61 bp, Homo Sapiens
agttgagggagtgataaagaatgttgacttyttccagatgaacaaagttgaatgaaaactt

SEQ ID NO: 29 - DNA, 61 bp, Homo Sapiens
tgccagatgagctctctgaagtcactgtaakcaattctcagagccaccaagtttaagtcag

SEQ ID NO: 30 - DNA, 61 bp, Homo Sapiens
gcaagatagatattagtactcctgctttttytgtcaactaaactgaggcacagagatgtta

SEQ ID NO: 31 - DNA, 61 bp, Homo Sapiens
tattattaattttagtaaaatcagtacatgwcacagagtacccctcagtaagtattggctg

SEQ ID NO: 32 - DNA, 61 bp, Homo Sapiens
gataagcccctttaacccaccgatcactgayatatgtgtgcaccacctagtggcacaagca

SEQ ID NO: 33 - DNA, 61 bp, Homo Sapiens
ctaaaacctgctgtgggcgtcacacttctcygggagcatcattgggcagctcagccggcca

SEQ ID NO: 34 - DNA, 61 bp, Homo Sapiens
aatgatgaagatttagctataaggaagtttwtcaaagcacattaagaaagacaatagttac

SEQ ID NO: 35 - DNA, 61 bp, Homo Sapiens
tatgcttcatcatattagcctttacctctcyagacaaagttcatccacctatttggtaagt

SEQ ID NO: 36 - DNA, 61 bp, Homo Sapiens
tgcaggcagttatggttttcctgcccaggaygttgccattgggttatgttgtccagaccac

SEQ ID NO: 37 - DNA, 61 bp, Homo Sapiens
aacttggacttttcctgaatatcgaatctgycagtagcagagaccaatactgattctctga

SEQ ID NO: 38 - DNA, 61 bp, Homo Sapiens
ttgaaccctgcattttccactataactagcrtctaataaaaaccaaccaagaatatttagt

SEQ ID NO: 39 - DNA, 61 bp, Homo Sapiens
ctctgaacttggtagctggtgctttaaatgwttgtttagcttcaatatttttgatgttcca

SEQ ID NO: 40 - DNA, 61 bp, Homo Sapiens
aacaacaaactgggaaagaggaggatttgayttttagagaagctacattatttaaaatgtc

SEQ ID NO: 41 - DNA, 61 bp, Homo Sapiens
atcatggagggaattcatatgctgagtaggwtatttgctggtttttatcttcaagtttcct

SEQ ID NO: 42 - DNA, 61 bp, Homo Sapiens
attttatttattttagaaattcatacaaatrgaaccatagaacaataacatttactctttt

SEQ ID NO: 43 - DNA, 61 bp, Homo Sapiens
tagaaaggagttcttcatatagtctgtataygagttgtttgtcagagatatatgagttgca

SEQ ID NO: 44 - DNA, 61 bp, Homo Sapiens
tacagaaagtttgttaacccttgatctagakaaccgtattcattttctattactgcataac

SEQ ID NO: 45 - DNA, 61 bp, Homo Sapiens
aggaagcagctcttgagcttagtacccaggyggaaagtaggagtgttccaggaggagggag

SEQ ID NO: 46 - DNA, 61 bp, Homo Sapiens
cttgtcccagataacaagagatacctgaaayaggctttaggatgaacctcaaaaactaaaa

SEQ ID NO: 47 - DNA, 61 bp, Homo Sapiens
aaactaaaaggaaaaacaaaaactggttctkacagtaggattatattcatatatgatgtaa

SEQ ID NO: 48 - DNA, 61 bp, Homo Sapiens
atgatgaattctttggtttgtctccccagcragtggcattaagccttgaagatgatggact

SEQ ID NO: 49 - DNA, 61 bp, Homo Sapiens
ttctccagggtacacatctaactttccccarctagtcctgatgtaatcttgtttgcctctt

SEQ ID NO: 50 - DNA, 61 bp, Homo Sapiens
tcacttggacagataattttgttgcctaagktattgcctctgagatatacttaggaactta

SEQ ID NO: 51 - DNA, 61 bp, Homo Sapiens
ttgattcaataaagatgagtcattaaaacaytgctgtggaattagttgtaagatcagcaat

SEQ ID NO: 52 - DNA, 61 bp, Homo Sapiens
tctctttcaacctccctgcatgacagctggmaagagcccatccctaatcttcaccaaccgg

SEQ ID NO: 53 - DNA, 61 bp, Homo Sapiens
ccagggaccagggggccatgaaagatgttawgtagagaagggtcagatttaggatttgaaa

SEQ ID NO: 54 - DNA, 61 bp, Homo Sapiens
tccatattcaaataaatagcatccagaactrtaactcaccttgaaccatcctcccctcccc

SEQ ID NO: 55 - DNA, 61 bp, Homo Sapiens
agcttagcacacgataaaggcttaagaagcrccagctgccactggcactcctggaattatg

SEQ ID NO: 56 - DNA, 61 bp, Homo Sapiens
acccctccctggacatgtgatgttcctaaarccctcagtttaaagatcccgtgggtccatt

SEQ ID NO: 57 - DNA, 61 bp, Homo Sapiens
aacacggggcctggctgcctcctcgcacccmggcttagaaaggtgaaactaaggccctgat

SEQ ID NO: 58 - DNA, 61 bp, Homo Sapiens
acttctcctgtcctatatcccgccattccargtcttcttaagtgaggagacgtctccagcc

SEQ ID NO: 59 - DNA, 61 bp, Homo Sapiens
catggaagccatgaccatactgaacatactytttgacttctcctgtcctatatcccgccat

SEQ ID NO: 60 - DNA, 61 bp, Homo Sapiens
tcattgctggctctgctgctgacatcataaygctggaggtaggagaagagcccatgtggat

SEQ ID NO: 61 - DNA, 61 bp, Homo Sapiens
gtaggggtgcatgacttaccctggcctggtrtagcctcaggtcctgtttataatttggtat

SEQ ID NO: 62 - DNA, 61 bp, Homo Sapiens
cgtatgtgtttgagtaggggcagagtggttrgttctgagatactggtcttctactgctagg

SEQ ID NO: 63 - DNA, 61 bp, Homo Sapiens
aaagcaaaggaccaatactcttataatatamaaatgcaactgcaacattgcctatcaatca

SEQ ID NO: 64 - DNA, 61 bp, Homo Sapiens
tgtacaaatgaatggtgatgcatattgcaaragcattgtgaataaagtaccagtcaaaagg

SEQ ID NO: 65 - DNA, 61 bp, Homo Sapiens
gtcacaatcacacaccacaaagtgacttatrtattaacagcagtcacaagtgcttatgtat

SEQ ID NO: 66 - DNA, 61 bp, Homo Sapiens
actttccatgggtcccaacgtgcccaggtamattcccagacaactgttgtcaatagatggc

SEQ ID NO: 67 - DNA, 61 bp, Homo Sapiens
tacacaagaaaatttagggtactggtacttyggggtgaaagattaaaagtaagagatacag

SEQ ID NO: 68 - DNA, 61 bp, Homo Sapiens
caggaaatgtagctaaatgaatgaatgaggycaactctatcacatgatgcttctagtaaca

SEQ ID NO: 69 - DNA, 61 bp, Homo Sapiens
gtttaggtagatgtcatacatttggatgaakaagttcccttctattcctagatgaaagttg

SEQ ID NO: 70 - DNA, 61 bp, Homo Sapiens
tcactacaggctcctactataccagactccrtttcttctctgttccatagctatctattct

SEQ ID NO: 71 - DNA, 61 bp, Homo Sapiens
atacatgagttgtgaatttagtataaagatkagagtcaaaaccacaactatgaatgaaata

SEQ ID NO: 72 - DNA, 61 bp, Homo Sapiens
taaaatattacttttataatttaagtgtgcrtcctctaagctattcggttttgtagttata

SEQ ID NO: 73 - DNA, 61 bp, Homo Sapiens
gttttgaggaacaccaaggtcctgaaaagaygggaaatgattagagatcaagattctttac

SEQ ID NO: 74 - DNA, 61 bp, Homo Sapiens
gacttttccatgaaagaggaaagtttctctscataacaagggggtggaaatgaattggatg

SEQ ID NO: 75 - DNA, 61 bp, Homo Sapiens
gatatagtcagggaagttattaatgatctcrttcagcagaagaggaaaccaaagattatag

SEQ ID NO: 76 - DNA, 61 bp, Homo Sapiens
actttattagtagtagaagtggaaagaaaaygttgctacgagttcagtattggtagtcagg

SEQ ID NO: 77 - DNA, 61 bp, Homo Sapiens
attcatgaagctacaaatcatgactagattwctggtcccaactctgccactttatggcctg

SEQ ID NO: 78 - DNA, 61 bp, Homo Sapiens
gagacctggactttagaccctctacccccarttagctgtgagaccttgagcaaatcatttc

SEQ ID NO: 79 - DNA, 61 bp, Homo Sapiens
tatagttttaattgaattaagtaagccactkgtcatttaacaagaaagtactgggttctta

SEQ ID NO: 80 - DNA, 61 bp, Homo Sapiens
  misc_feature (31)..(31): n is a, c, g, or t
gacgctttgtgaattcataacaagggctccnagtcaccagatcttagagctgacccagtgc

SEQ ID NO: 81 - DNA, 61 bp, Homo Sapiens
attacagatgaataagacctgcctagtaggrgttaatagataagcacacaaacagctaagc

SEQ ID NO: 82 - DNA, 61 bp, Homo Sapiens
tctttcttagctgcctggtattaactcatgsggacgttctggatcctgggagaatccagat

SEQ ID NO: 83 - DNA, 61 bp, Homo Sapiens
gcctttcatggccttgccactggggtaaackctttggtcctagtgtgggttcagtgacttt

SEQ ID NO: 84 - DNA, 61 bp, Homo Sapiens
tttacccaaaatataggagaagaatatcaarggatcatcctaacattttaatctgattcct

SEQ ID NO: 85 - DNA, 61 bp, Homo Sapiens
ttgttgagtgatgcatgacatatgactgttygttgtcctcatttgaatgcatgtgccttga

SEQ ID NO: 86 - DNA, 61 bp, Homo Sapiens
ttggaacagcacccagacaggcctctaaagyacaaagcagaagtacagtgcgtgaactaac

SEQ ID NO: 87 - DNA, 61 bp, Homo Sapiens
gaaaactgcactgctcatctgtctgcactgrgttagcaaatattagggttcatttgctttc

SEQ ID NO: 88 - DNA, 61 bp, Homo Sapiens
gtctcacccaaccgtaagcagctcgaaagcrggatcatgtctgtttttgcttaccccagca

SEQ ID NO: 89 - DNA, 61 bp, Homo Sapiens
ccttcacatctgtcccacactgcctttaacsacgagccatataccaaagtaatggctgccg

SEQ ID NO: 90 - DNA, 61 bp, Homo Sapiens
gcagcaaaaactaagaaaagttgcattgackttgaagagcctgtcagtactgatgaaatgc

SEQ ID NO: 91 - DNA, 61 bp, Homo Sapiens
gaaatttctacaaagaaagtaggctctatcrttttctcgttgatgtgcttcccatttcaac

SEQ ID NO: 92 - DNA, 61 bp, Homo Sapiens
acattattattcttcctcttactcgattctratattgttgtggagagagactgggagactt

SEQ ID NO: 93 - DNA, 61 bp, Homo Sapiens
aagtcaaaggtaagagaggtctctcagattrcaacttaggtctccttgatttcagacatgc

SEQ ID NO: 94 - DNA, 61 bp, Homo Sapiens
tgatgaattcatcttattagtcatcatgtcraaatgaaaatatagccctttcatcatgtta

SEQ ID NO: 95 - DNA, 61 bp, Homo Sapiens
tgactagggaggcagagctacagagatttcrtgaatggacatcactgaggtagcgtaccaa

SEQ ID NO: 96 - DNA, 61 bp, Homo Sapiens
tgctactcatggaagaaacatcctggggcaktttgttgggctattcctgaagctcacaggt

SEQ ID NO: 97 - DNA, 61 bp, Homo Sapiens
gcatgagcgagaccttgagtcccggggtccycttggaaaatagctagcgatataccattgc

SEQ ID NO: 98 - DNA, 61 bp, Homo Sapiens
tatggtgaaaactctaatagtctctcttcascggagccactgaaggaagataagcctgtca

SEQ ID NO: 99 - DNA, 61 bp, Homo Sapiens
ggctagaacttaggtcagttgactccaagtycagtgatacttacacaacagcttcaaactg

SEQ ID NO: 100 - DNA, 61 bp, Homo Sapiens
taccttaccctatgcgtctctcccatttagyttgccccacatatcctttataataaaacca

SEQ ID NO: 101 - DNA, 61 bp, Homo Sapiens
aattcacaggcatattcttgagggaacataraagtaaccagtaacgctgctagtggcaatc

SEQ ID NO: 102 - DNA, 61 bp, Homo Sapiens
acatgctaagagatttggaacactttagccrtagcgtctcatgatcactgccttttcacaa

SEQ ID NO: 103 - DNA, 61 bp, Homo Sapiens
actattaggagtatgtctaacattctgtttsgatttttcattttcaaattactgatttatc

SEQ ID NO: 104 - DNA, 61 bp, Homo Sapiens
tctaaaataacttgctttatgtttgagaaamgattgttcagtagtctgtaagtagacttgt

SEQ ID NO: 105 - DNA, 61 bp, Homo Sapiens
ctcttttcaaaacatattttgagttgtttcrggatcattttccagagactaagacaaagcc

SEQ ID NO: 106 - DNA, 61 bp, Homo Sapiens
cacatatacatactctatgcattggcttagwtaatataaaaacagcacaggaatagtttat

SEQ ID NO: 107 - DNA, 61 bp, Homo Sapiens
ttgccagcattatcagatttgtattaagtgwcaaaagtttcctcttgtcaaagtgtaaacc

SEQ ID NO: 108 - DNA, 61 bp, Homo Sapiens
tttagtacttgtgtgctggaaattagaaacytcagatgccctgcacagtgtaggactatac

SEQ ID NO: 109 - DNA, 61 bp, Homo Sapiens
agttaaaaattattagacagatctaatctaycaattctaagtgtcttgagcagatgatata

SEQ ID NO: 110 - DNA, 61 bp, Homo Sapiens
tgctgtcctagagagctgtccccaagcctawgcccctgtcactactgggagcaggatgcca

SEQ ID NO: 111 - DNA, 61 bp, Homo Sapiens
gggcagaattctggcagttctctgtggtctygtttttacaaatagaaccagggacaggggt

SEQ ID NO: 112 - DNA, 61 bp, Homo Sapiens
atttaagtctagtgaatagggagttgctatytgaaaaatatcaaatttttcctttatgaaa

SEQ ID NO: 113 - DNA, 61 bp, Homo Sapiens
caatcagctattgacccaaagctcacagctratggacttgccaatgggcctaataatgaaa

SEQ ID NO: 114 - DNA, 61 bp, Homo Sapiens
gaattgaggtgaagatcacaagaaatgaaawcggctgggcttcatagaattctgctttgct

SEQ ID NO: 115 - DNA, 61 bp, Homo Sapiens
gatgtggaaacccaggtgcagagaggttatrtaatttgccatagtcatatcactaataatt

SEQ ID NO: 116 - DNA, 61 bp, Homo Sapiens
attcttgacacaaacctgtgcagaacatagkctaatgcccatttagaggttggaaaactga

SEQ ID NO: 117 - DNA, 61 bp, Homo Sapiens
tcacaattaggcattttcaccaacattagcrcattcagttgtcacagtgaaaactaattca

SEQ ID NO: 118 - DNA, 61 bp, Homo Sapiens
gaaacccaaacatcacctcctctgtgaagtscttcctctctgacacctgagcatgcctttc

SEQ ID NO: 119 - DNA, 61 bp, Homo Sapiens
agttcatccacagcaagtctgcagcagagarggagtatgaaagaagcttaagcacatggtt

SEQ ID NO: 120 - DNA, 61 bp, Homo Sapiens
gaggcaggcctcgcacagtgaccctgttgaygtgccatcctttattttgttttaataacaa

SEQ ID NO: 121 - DNA, 61 bp, Homo Sapiens
ttaatatcaatactattcctattctattcargtcaactaagacaatgttttcaaattttag

SEQ ID NO: 122 - DNA, 61 bp, Homo Sapiens
aaggttacctaaatggatgcattattttacrgtcaaaagatattatccaatgaacctaatg

SEQ ID NO: 123 - DNA, 61 bp, Homo Sapiens
ttaaagttatcgtgaagaccaaataagacarcgcatgtaaaattcctgggattaataaatt

SEQ ID NO: 124 - DNA, 61 bp, Homo Sapiens
ctttgattagaaagattttctttttagcagrtcctatgtgctattgtcaagcctatattcg

SEQ ID NO: 125 - DNA, 61 bp, Homo Sapiens
tgtccttgtcccctcttttccattcacttgytctaaatcaatagttctcaaaccctccgtg

SEQ ID NO: 126 - DNA, 61 bp, Homo Sapiens
ttccatacctctttcttcctgcagccactgwgggtgtccatgatagtaataacttccataa

SEQ ID NO: 127 - DNA, 61 bp, Homo Sapiens
accccagcctagaatctgcttgaaagccacrgttaattctagatcctgtaaacagaatcaa

SEQ ID NO: 128 - DNA, 61 bp, Homo Sapiens
ggtgccagaaagatgggcagataaccagaaraggatggtgtcccagaagccagaggtgatg

SEQ ID NO: 129 - DNA, 61 bp, Homo Sapiens
acttgctgcctcctcttccgtaatttccatrtgctgtagaagtgatttctatgtctaatcc

SEQ ID NO: 130 - DNA, 61 bp, Homo Sapiens
caatgtcctccagaacctgaaatttgaattyggttttttggcatcataagtggcttctatg

SEQ ID NO: 131 - DNA, 61 bp, Homo Sapiens
agattgtaggctttggtgtcagacatttgayattagaattctggcttttttaccagcccct

SEQ ID NO: 132 - DNA, 61 bp, Homo Sapiens
tgctttgcttatgaagaacataacaataacwtctattgaatactgtttatttggtgttctg

SEQ ID NO: 133 - DNA, 61 bp, Homo Sapiens
tgctgtaaaccactggattagtcctttgtaygataccatgtaggatttagatgtttaaata

SEQ ID NO: 134 - DNA, 61 bp, Homo Sapiens
gggtaccctggccttggggtggtcagttctraaagataacctgcacattatgagttatttc

SEQ ID NO: 135 - DNA, 61 bp, Homo Sapiens
acaacagcttatgaacaattaaccaacacartgcccagaatatagtaggggcctaagaaga

SEQ ID NO: 136 - DNA, 61 bp, Homo Sapiens
gctactgagatgagtggtgcatcattaaccytcattgttaagcttctgtcataaggcgggt

SEQ ID NO: 137 - DNA, 61 bp, Homo Sapiens
gagtctgccacctcccagttgtgccaccttygagatgactcttcattggcttcaccctcca

SEQ ID NO: 138 - DNA, 61 bp, Homo Sapiens
gatcatttttcattcttacaacaggatttawagctttcatgggctctatcccttgcttatt

SEQ ID NO: 139 - DNA, 61 bp, Homo Sapiens
ctcatatgatcacattaatagatgttggagkgacatttgataatatttaacagctaatccc

SEQ ID NO: 140 - DNA, 61 bp, Homo Sapiens
aaactccagactgtatgattccacagtgtayttccattcatctcatgaaggacatctttgt

SEQ ID NO: 141 - DNA, 61 bp, Homo Sapiens
gttctagaaactatctaagatgatcaagtcraagttaatttcacaacttcttagagtctgg

SEQ ID NO: 142 - DNA, 61 bp, Homo Sapiens
acaacaccaactcaactatgtgttgggtgcyggtcagaaattttgaaatacaagaaggaaa

SEQ ID NO: 143 - DNA, 61 bp, Homo Sapiens
agagaaaggagattccgtgtgaaacatttaygctaaagtactgcttttacctgtaacatct

SEQ ID NO: 144 - DNA, 61 bp, Homo Sapiens
gcatactacatgtaaaacattgtgctgaggracaagacaacaaggtcccttgtctattgga

SEQ ID NO: 145 - DNA, 61 bp, Homo Sapiens
ctttcctgagatgggaaagagtgaagaagarctggttttgggcataatgtcaggagcttag

SEQ ID NO: 146 - DNA, 61 bp, Homo Sapiens
aatgattaaatctgggtgactgggatattcmtaacctcaaacatttatgatttcataggca

SEQ ID NO: 147 - DNA, 61 bp, Homo Sapiens
ttgaatccctggatgccgaacccacggatacygaaggctgactatacctgataagagattt

SEQ ID NO: 148 - DNA, 61 bp, Homo Sapiens
aaaggctgctattatccaaaagtgttgcttwctacaagtttagcctgacatctttcagtgg

SEQ ID NO: 149 - DNA, 61 bp, Homo Sapiens
agtggcaagtgcagagtaattcttcctaaarggtgagaagagagaaaggaaattattttgc

SEQ ID NO: 150 - DNA, 61 bp, Homo Sapiens
atcaattctcagaccaccagtgctgtaaaakactactccactcttctttttaaaatcccaa

SEQ ID NO: 151 - DNA, 61 bp, Homo Sapiens
accagagactgaagaacacttttggaagcayaaaatctgtgattattatctagctttccag

SEQ ID NO: 152 - DNA, 61 bp, Homo Sapiens
ccctttcaacatatttccaagcgctttttayacccaatattatttgaaaaatacaaaggcc

SEQ ID NO: 153 - DNA, 61 bp, Homo Sapiens
cagccgattaatcttttacaaaagatctctmatctgttaactcctaatgtaagtgatgatg

SEQ ID NO: 154 - DNA, 61 bp, Homo Sapiens
ctacctttgcagctagagctaaatgatcccycaggaatgtttccaggtcatgaaggaacat

SEQ ID NO: 155 - DNA, 61 bp, Homo Sapiens
agaagaccaaaaagcttggaggattgtgcarttttagagaataaaacatcaatatgaccta

SEQ ID NO: 156 - DNA, 61 bp, Homo Sapiens
cttttaattgttgatgtcatcatcaaggaakatagtggagtcttaactgttttccccaaaa

SEQ ID NO: 157 - DNA, 61 bp, Homo Sapiens
gtatccatcagaggggtctgggctataaaaygcttaatggcaataaagactacagctcagc

SEQ ID NO: 158 - DNA, 61 bp, Homo Sapiens
cctttaaatggaagagttcaatcactcattyggttcgtatgcagtttttccttatttcact

SEQ ID NO: 159 - DNA, 61 bp, Homo Sapiens
aaggaatcaacagcacaacaatccatcttargtggtttccacctgaagaactgaatggacc

SEQ ID NO: 160 - DNA, 61 bp, Homo Sapiens
cctacaaaaaatgtctggactgagggaagargtatcctaacgtcctcataagaagcttcct

SEQ ID NO: 161 - DNA, 61 bp, Homo Sapiens
gcaaaccttgctatatccaacaaatagagcrtgaagaaggtaaggaatatgtgaaccaggc

SEQ ID NO: 162 - DNA, 61 bp, Homo Sapiens
gacaaggaagactacgtatttctcatgaccrgatgaagaccacaaggaagaaagacagggt

SEQ ID NO: 163 - DNA, 61 bp, Homo Sapiens
aaaaacagatgtatgaatgaaatggatagakagctgaatggatgaatgggtggatagatgg

SEQ ID NO: 164 - DNA, 61 bp, Homo Sapiens
tactgcttacagagtatttctagaccacgayttagggagagaaatcccagatggagctcag

SEQ ID NO: 165 - DNA, 61 bp, Homo Sapiens
taagagaaaactagttgacaacattcagagrgaattttcaggagctgcatcatagacagag

SEQ ID NO: 166 - DNA, 61 bp, Homo Sapiens
tcagctgtttaacatagctccaagctctcawcccaaataacatagagctccaaagaagttt

SEQ ID NO: 167 - DNA, 61 bp, Homo Sapiens
gatattctgtattttctatgtgacttatttyattggtctctggaaatttttgtttcctttt

SEQ ID NO: 168 - DNA, 61 bp, Homo Sapiens
atccatagtctttcattcttcctagattcartaattcctttgcttgtctatttagttttct

SEQ ID NO: 169 - DNA, 61 bp, Homo Sapiens
ttattgcaggatcttactcttttctgttgtsagtaaccttcccaccaaactcattgtgaca

SEQ ID NO: 170 - DNA, 61 bp, Homo Sapiens
aatcagggtgaaaaccagcagcctagttacygctagaggatcagaatgggagtggagctgt

SEQ ID NO: 171 - DNA, 61 bp, Homo Sapiens
cgctagttagggaacatgcgttagtataccmtgcctattatcgagtttttatttcaacttc

SEQ ID NO: 172 - DNA, 61 bp, Homo Sapiens
gaaattgtgtgttctgatattgcctgcagcrctgtactatccatccattaaatccatggaa

SEQ ID NO: 173 - DNA, 61 bp, Homo Sapiens
atagagcactgttataaatgcctccttgctygtccgtattccccaatagactctaagcttt

SEQ ID NO: 174 - DNA, 61 bp, Homo Sapiens
tttagagcttaacatttggcagtaccaatcrtttggcctgctaggtcccttatttgcatgg

SEQ ID NO: 175 - DNA, 61 bp, Homo Sapiens
gagttgcaaattttaaataccgtaagatcartgatggaaaagaactttttatatcagaact

SEQ ID NO: 176 - DNA, 61 bp, Homo Sapiens
aatcgctatctaaacttgatgagtataataytgcatgtggagtccctgtcaatttttacta

SEQ ID NO: 177 - DNA, 61 bp, Homo Sapiens
aaggagtaagaagcatgtatagttcacctcmttagtaataaaccttcttaaaacagggaga

SEQ ID NO: 178 - DNA, 61 bp, Homo Sapiens
tatgtttgcatctgtctacaatatgacttgrgccaaatctgatctggccatggcatcctga

SEQ ID NO: 179 - DNA, 61 bp, Homo Sapiens
aggagtaagttctcctttctgaagctaaacsagtaattttaaagcttccttcacctcgaat

SEQ ID NO: 180 - DNA, 61 bp, Homo Sapiens
gaaaaaaaaatttagtttggatcttcttctkgtttcttagttgccattttaaatatgtagg

SEQ ID NO: 181 - DNA, 61 bp, Homo Sapiens
tctgtacagtagcttttgtccagcttcttcrttagttttagtgggatttctctgagcagcg

SEQ ID NO: 182 - DNA, 61 bp, Homo Sapiens
caaaaaagtctgatgtttcatcaaggaattytatgatttcaaatttgaccttcctattcct

SEQ ID NO: 183 - DNA, 61 bp, Homo Sapiens
tattttaagactggaacctattaaagtcttrggtacataggccctagtggtaaacatttca

SEQ ID NO: 184 - DNA, 61 bp, Homo Sapiens
tctaaatatatatttccatgtgcataaagawatccataaatactaattaaactgcttgtaa

SEQ ID NO: 185 - DNA, 61 bp, Homo Sapiens
ccagcagatggttagcaacatgacaaggacraagcgttcccggctgtgggctcccaggctc

SEQ ID NO: 186 - DNA, 61 bp, Homo Sapiens
gcagtattataatccgatgtggccacagtcrtatatgcggtctgttgttgactgaaacatc

SEQ ID NO: 187 - DNA, 61 bp, Homo Sapiens
agggttctgtccacacgtgtccttgggttaytttccacttgctgatttgcttcccgggtgc

SEQ ID NO: 188 - DNA, 61 bp, Homo Sapiens
ctttgtctctttcttttaaacataaatcagrccatgttattttcttgctcaaaaactttca

SEQ ID NO: 189 - DNA, 61 bp, Homo Sapiens
ttagtggtgccctaggtgaggtctaatcacygttgagactagggctcctcctgcttagtct

SEQ ID NO: 190 - DNA, 61 bp, Homo Sapiens
cttcctttcagcgtataatatggccaggtgyttgagagattcattaaaatcatttttcatt

SEQ ID NO: 191 - DNA, 61 bp, Homo Sapiens
ctcatctcctcaactgcccttcattcacttkttttaatcacataaatcaatgtttgaacta

SEQ ID NO: 192 - DNA, 61 bp, Homo Sapiens
tcgggatcatatgagtttggtttaggtaggrccttcaggttgatcttagacaatccaagag

SEQ ID NO: 193 - DNA, 61 bp, Homo Sapiens
gagagtataaatatggcaacctgtcagtccragagtctttattacaaataacagaagctta

SEQ ID NO: 194 - DNA, 61 bp, Homo Sapiens
cctgacgaaaagcttgcaccagcccattgtrgttgttctttattcccaggacctttgggga

SEQ ID NO: 195 - DNA, 61 bp, Homo Sapiens
ggacaggacagtgatgattgctagaagaaartgatgctgtgaggacctggccaccatcaag

SEQ ID NO: 196 - DNA, 61 bp, Homo Sapiens
tgtgagaaaagagataagaaccagaattttmcaagcaaagggatagagagctacaaggtgg

SEQ ID NO: 197 - DNA, 61 bp, Homo Sapiens
tctttctcctaacctgaatacgtcatattamcatttcaatactctttccttcattaggtgc

SEQ ID NO: 198 - DNA, 61 bp, Homo Sapiens
gacctggtctagaaattggagaagttccagygggagatcctcttccacgaggaaatggctc

SEQ ID NO: 199 - DNA, 61 bp, Homo Sapiens
agaaactttaaaccttacatgtttgacagcwtcacagagtacaaagctcaccgtggctctt

SEQ ID NO: 200 - DNA, 61 bp, Homo Sapiens
aaagaaacccctacggaatcaatccctcacrtactttttatttgcaaaaaggcaactgagt

SEQ ID NO: 201 - DNA, 61 bp, Homo Sapiens
ctcaataaatgtgcattgatttttgactggwtttccttatttaggctaataatattgatgt

SEQ ID NO: 202 - DNA, 61 bp, Homo Sapiens
ttccagacaggcatcttcctaagccatgaakacaaaatagtgagtgtggtattatttttct

SEQ ID NO: 203 - DNA, 61 bp, Homo Sapiens
aattgcctttttaactccgtcacctattttrttactgctgtaaactccttattacctaaaa

SEQ ID NO: 204 - DNA, 61 bp, Homo Sapiens
ttggaaaaatgactgataaacactgtgtacmtatcacaatgtttaaagtttctttggtttt

SEQ ID NO: 205 - DNA, 61 bp, Homo Sapiens
aagatttcaagtgtttggtactggaggctcycagagggcagaacagtatctgttttgttca

SEQ ID NO: 206 - DNA, 61 bp, Homo Sapiens
ctggtaaacatctataaatttaagcatcttrtgaggattgaataatagaataaatgtaaag

SEQ ID NO: 207 - DNA, 61 bp, Homo Sapiens
caaggtttgcttgtaataaagaatgcataaygagccctgtgtcctgagtacgtggattcag

SEQ ID NO: 208 - DNA, 61 bp, Homo Sapiens
aaaatttggagattattttcagggaagaaaraatgatcaggtagttatccttatttttaat

SEQ ID NO: 209 - DNA, 61 bp, Homo Sapiens
caaggagctggtgaggaagaagccaaggggrgcaagcggcccaaggaaggcctgctccaaa

SEQ ID NO: 210 - DNA, 61 bp, Homo Sapiens
taacagatacaggtttatgtggtgatatcartgatttctagacgattacgattttttatat

SEQ ID NO: 211 - DNA, 61 bp, Homo Sapiens
atcatgactgtctgaacaccctactctttcstaagaatcaaccctcagatcccactggaaa

SEQ ID NO: 212 - DNA, 61 bp, Homo Sapiens
caacagagtagcttaggtacacccactccaytgacctccaaaagtcaccggatcctcaggc

SEQ ID NO: 213 - DNA, 61 bp, Homo Sapiens
ggttcaacagccaaagacttccttaagcagrcctcactactatgccatgggacctgttccc

SEQ ID NO: 214 - DNA, 61 bp, Homo Sapiens
tttcacttaaagtaaacatacgatcattgcmtcattttctttctcagccgaaagtatttat

SEQ ID NO: 215 - DNA, 61 bp, Homo Sapiens
tcctcttccactgtgcagattgttagtagtytgaatttgaaggatacgatattttaagaga

SEQ ID NO: 216 - DNA, 61 bp, Homo Sapiens
ctcattctcccatcacaccatcggtctctgraaaaaaatggtcccttccacgactatattc

SEQ ID NO: 217 - DNA, 61 bp, Homo Sapiens
caccccaagaattttcagaatttgaaactcrtcccgaaatcatttgcacacattatctcat

SEQ ID NO: 218 - DNA, 61 bp, Homo Sapiens
ctcgaacttgttttattcataaagaattagrtgatcgatacaaacctaaaaacttatgatt

SEQ ID NO: 219 - DNA, 61 bp, Homo Sapiens
aagagtttttttttctaagtttttctcaccrtgattttaataatattgcatgtgttgtttc

SEQ ID NO: 220 - DNA, 61 bp, Homo Sapiens
tctttaaaccagacatgatgttaatacggcrgatttctttcatatcatttgggtaattcat

SEQ ID NO: 221 - DNA, 61 bp, Homo Sapiens
gatgtgagctcatcaagaatgctcaggggamgtttcttcttggaaggtccagttaagctga

SEQ ID NO: 222 - DNA, 61 bp, Homo Sapiens
gctatgtcattttatgccatgtcagtttatrgagagtggcacaagatacaacaggataggg

SEQ ID NO: 223 - DNA, 61 bp, Homo Sapiens
aagacttaagttctagtcttaatatcattgmctataggagttgtgactttggtttttagtt

SEQ ID NO: 224 - DNA, 61 bp, Homo Sapiens
gagcaaatatgcttcactcttaacaaacacwtacttcacaacattcccactgacagaagct

SEQ ID NO: 225 - DNA, 61 bp, Homo Sapiens
agtccacactgaatgaagatggtgaatactraggtttcccacccactcttggaactggcta

SEQ ID NO: 226 - DNA, 61 bp, Homo Sapiens
ttatgtctatctatagacagatatcctgtgracttcgtttgtattttgtatccacaaaagc

SEQ ID NO: 227 - DNA, 61 bp, Homo Sapiens
aaaataggtgatacagtgtgcgtaaaattgraaagtccagaggaatatacaacaattgtta

SEQ ID NO: 228 - DNA, 61 bp, Homo Sapiens
ttgtgatgataaatcctgctctgcctacttyacagagctgacagtagatgcagaaatgcct

SEQ ID NO: 229 - DNA, 61 bp, Homo Sapiens
tggaactcctttgataatttttggctggatrtgcacgtacacatttaccttcagtcacaca

SEQ ID NO: 230 - DNA, 61 bp, Homo Sapiens
aatctttaggatttagaaccgacaggacttrccatttgattggatgtgaggaagtggagta

SEQ ID NO: 231 - DNA, 61 bp, Homo Sapiens
ctctagatgatcatggagggctagattagarggtcgcggtatgagggaggattggaaaaat

SEQ ID NO: 232 - DNA, 61 bp, Homo Sapiens
cttgcttcacaagagggattttttctctccracagctgagttagagcaggctaaggtggtg

SEQ ID NO: 233 - DNA, 61 bp, Homo Sapiens
ctttctcattctgtccagattctgttggtcygtagctggcgaggtctttcttggccagaag

SEQ ID NO: 234 - DNA, 61 bp, Homo Sapiens
ctacaggacaggcaaaggagtattttgttgsaggataagatgcttgatattatgaaacata

SEQ ID NO: 235 - DNA, 61 bp, Homo Sapiens
ttaaggcatttcataaattgtcggtaagagrctttgccaatatcctcatttgtgtttattg

SEQ ID NO: 236 - DNA, 61 bp, Homo Sapiens
acgaggcttaaaaataatattgcagtcatckctggcagtctgaaagctgtgtacataccca

SEQ ID NO: 237 - DNA, 61 bp, Homo Sapiens
actttcagaaggaccaaccacgaaaaccacyctgatcttttttgttgtcgttgtttgtttg

SEQ ID NO: 238 - DNA, 61 bp, Homo Sapiens
tatagtagggggaattcaggtttatagatgragtctgcctagttctttatctccatagggc

SEQ ID NO: 239 - DNA, 61 bp, Homo Sapiens
atgaatatggtagcaagtgtcttccttcctktgaaatatgagttttcatcagctgttggat

SEQ ID NO: 240 - DNA, 61 bp, Homo Sapiens
tagtagtcgttcactttcaaactctgtcacwttgaggatcttttacacctgacaacgcagt

SEQ ID NO: 241 - DNA, 61 bp, Homo Sapiens
atcaatgtaaggcatgtactaacactgttcyatagcttaaaatgttgcattcaacaagagt

SEQ ID NO: 242 - DNA, 61 bp, Homo Sapiens
gctttaacaacaatgacattggatcttagcragctcataccggtggagcaagttcgtaccg

SEQ ID NO: 243 - DNA, 61 bp, Homo Sapiens
aacaaatgtgtggtctcatggtttgaaaaaytgtgaatcaaatcatattgcatatgaggtc

SEQ ID NO: 244 - DNA, 61 bp, Homo Sapiens
ccacattttcagaaagcatttgctcaattcrtcgcaaactggaattactacagaaattgtg

SEQ ID NO: 245 - DNA, 61 bp, Homo Sapiens
acatttaaaacaatttgtcaaatatcagtartaccatttgttctagttgcggtaaatcatt

SEQ ID NO: 246 - DNA, 61 bp, Homo Sapiens
ttttttaatgagagaaggcagacttttcaaygtttttagagaaaagtaatcttttttatct

SEQ ID NO: 247 - DNA, 61 bp, Homo Sapiens
aatacatttacccgagcttttgatttgataytgtgttactatatgagaagaaaaggcctgg

SEQ ID NO: 248 - DNA, 61 bp, Homo Sapiens
taagtgatatttaccaaaaacaggcttgctyagtttggaagattgtaaagaggaaactctt

SEQ ID NO: 249 - DNA, 61 bp, Homo Sapiens
gactgatgacgttgtcactttggagtagctkgtccgatgcacatcaggtaagcaagtgcat

SEQ ID NO: 250 - DNA, 61 bp, Homo Sapiens
gatgattcagtcttataactgtattgaatgyggaggaatagttacttattagtgaacctca

SEQ ID NO: 251 - DNA, 61 bp, Homo Sapiens
ttctgctcatgtttcttcttgacctcttgcrtaatctttttgttttctagacagttcacta

SEQ ID NO: 252 - DNA, 61 bp, Homo Sapiens
aatgaagttgtaggcatggtaagagctccayagagtgagtcagatcctcaactgacacaaa

SEQ ID NO: 253 - DNA, 61 bp, Homo Sapiens
gccaacccactcctgttaaatttctctcacrgagtctccacaacttctggtcattccttgc

SEQ ID NO: 254 - DNA, 61 bp, Homo Sapiens
ttactgcagagtttccatttcttgtcttacrtaaaagtcaacatcaggaagtctccctttc

SEQ ID NO: 255 - DNA, 61 bp, Homo Sapiens
atgccttatttaagaagaagtttctaggaamacccaaagacaacagcggggaataaaaaca

SEQ ID NO: 256 - DNA, 61 bp, Homo Sapiens
ctgtacagcaggaacctgtcttgtgtggttwgagacaaatgacaatgaagagatggatatg

SEQ ID NO: 257 - DNA, 61 bp, Homo Sapiens
gttgcccgccatttatgcaaaagcagaatcmaggtctgaaatagttgttcaaaaaggtgca

SEQ ID NO: 258 - DNA, 61 bp, Homo Sapiens
tagtagtttttttattgtgtgatcgccccarcatatttatggttttaggttatggattttt

SEQ ID NO: 259 - DNA, 61 bp, Homo Sapiens
tttcgtcaaaaagaccaaagcccatgtcacyatcagacttctcggattcttctttctttgc

SEQ ID NO: 260 - DNA, 61 bp, Homo Sapiens
gcaacacagtaaagaggcaagagtagggackttggaccaggcattcattcactattttatt

SEQ ID NO: 261 - DNA, 61 bp, Homo Sapiens
atataatatctcttgacaccctttccacttrttgccaccctattttccttcttccctttat

SEQ ID NO: 262 - DNA, 61 bp, Homo Sapiens
gggaagaggaacataaaaacgcttctgtaayggcaccatcattctgagtgatgtttgtccc

SEQ ID NO: 263 - DNA, 61 bp, Homo Sapiens
catggcatcttctccctacacctctattttstcttcttatcaggacactactcaagttgga

SEQ ID NO: 264 - DNA, 61 bp, Homo Sapiens
gcataagaaacatggagtaatttatgagagscgctcgtcaatattcacgggggttattcaa

SEQ ID NO: 265 - DNA, 61 bp, Homo Sapiens
tgtcatcgtccccaggcttcttttgcagtawcttcctcttcaaaccccagcccttggcaac

SEQ ID NO: 266 - DNA, 61 bp, Homo Sapiens
aaagaagaaatttggatggctcatcttaagwtagtgcccacatttggtccaatcagctgtg

SEQ ID NO: 267 - DNA, 61 bp, Homo Sapiens
catcctacctactcaatcaaaccttttagcrccagcctgagaaacagaaaacatgtggagg

SEQ ID NO: 268 - DNA, 61 bp, Homo Sapiens
tttttccaatctctagagatactgctttgarcttactccttcatatttaaaaggagaaaag

SEQ ID NO: 269 - DNA, 61 bp, Homo Sapiens
tgagcgcaccagcagaggtttgaagcaatcygaagcagtttggagccttggatgaccaata

SEQ ID NO: 270 - DNA, 61 bp, Homo Sapiens
atttcagcccaaatctatttatctttccaawgtctactcaacagtgctacctggatgttta

SEQ ID NO: 271 - DNA, 61 bp, Homo Sapiens
gggacttggtgctccttgcgaagtgattgamctacacagatgatgccttttatgtttgtaa

SEQ ID NO: 272 - DNA, 61 bp, Homo Sapiens
aattcttactctaatagtttaggatatctcrcaaaaccataaaagttggcaattttcatat

SEQ ID NO: 273 - DNA, 61 bp, Homo Sapiens
catttcgagtttggttcacaaaggcatacarcaagtttattgtgtgtgtgtttattgatac

SEQ ID NO: 274 - DNA, 61 bp, Homo Sapiens
tttcacctgtatgggtccatctcataagctsttgggaaaccgggccacatggtgggcaatt

SEQ ID NO: 275 - DNA, 61 bp, Homo Sapiens
atcagcctttgtcaggagaaaagggtcgtayagtacagacatatccacagttgcctgccca

SEQ ID NO: 276 - DNA, 61 bp, Homo Sapiens
tgaactgtagaggagttcacgaccaaatctstgatgctttccccagatctttcttcagggc

SEQ ID NO: 277 - DNA, 61 bp, Homo Sapiens
tgaggatgcacagggccagggcagaattgaytgttgctcagaggatgcaccggggtgtctc

SEQ ID NO: 278 - DNA, 61 bp, Homo Sapiens
gccactgcaggtggagatatgacttgactcrctgtatggatatttactgtcccccatcatg

SEQ ID NO: 279 - DNA, 61 bp, Homo Sapiens
tggtggaagccctctactgtggcccaacatscggtctttctctttatacttcaaagtcagc

SEQ ID NO: 280 - DNA, 61 bp, Homo Sapiens
tttactcttatttcatttactctgctcaacwatcctatgacacaaacattgtcaatgtctg

SEQ ID NO: 281 - DNA, 61 bp, Homo Sapiens
acctccatggcctcaggaatcaaagtcctcrgtctctttcacgcggggttcagaaagaaaa

SEQ ID NO: 282 - DNA, 61 bp, Homo Sapiens
tcatggctgtgattgatgggatgtcttaagytgcttcatttttgccctacagtggatctct

SEQ ID NO: 283 - DNA, 61 bp, Homo Sapiens
ggagaccaggattcatgctggtctggaacartgacattgccaacttaagacacacaaagca

SEQ ID NO: 284 - DNA, 61 bp, Homo Sapiens
cctcagctgctttgtttaccttttaaatccmggcacaagcgagtgctgccactggccctaa

SEQ ID NO: 285 - DNA, 61 bp, Homo Sapiens
tggtttttcctgtggctcgggcctcagcttygtatcacctctgcagagaggctctccgtgg

SEQ ID NO: 286 - DNA, 61 bp, Homo Sapiens
attatttcctggtcactggaacttttctcawccttcctagatccttctagtggactttctc

SEQ ID NO: 287 - DNA, 61 bp, Homo Sapiens
gcaactcttggctcccttctgctagcatgawtttttgtgtagaatttgaccctagcaaaca

SEQ ID NO: 288 - DNA, 61 bp, Homo Sapiens
gaccagaggacactggcttgtagaacgatgyggaaatggagacagacacttcgaaaggtga

SEQ ID NO: 289 - DNA, 61 bp, Homo Sapiens
ctgccatccagagagaacagagtttggaccrtgtccgcagaaggccttggagtgttgacgt

SEQ ID NO: 290 - DNA, 61 bp, Homo Sapiens
gaggcttgggacctgaaggcccattttcccmcagtgatgttgcgaggtaggtgtttagggt

SEQ ID NO: 291 - DNA, 61 bp, Homo Sapiens
acttctatccctccttcctggcactccatartcactttactatgctttgtcttttgctgtg

SEQ ID NO: 292 - DNA, 61 bp, Homo Sapiens
tagacggacacaacagatactcctttctccstgctgtgcagcctggagagtgtccccagag

SEQ ID NO: 293 - DNA, 61 bp, Homo Sapiens
atgtttggttgggggtgtcaccaaagtaacrgtccattattcaaactggcagacatttgac

SEQ ID NO: 294 - DNA, 61 bp, Homo Sapiens
tggtgacaggaacaggaggaggttaaagcartccgtgccctgagtgagcgcagggtgcaga

SEQ ID NO: 295 - DNA, 61 bp, Homo Sapiens
ccccagctgacctcgacatgcagatattctycattcaggcctgtccttcaaggttcgaggt

SEQ ID NO: 296 - DNA, 61 bp, Homo Sapiens
tgtggcctggacagtgtgaccagatgacccragaatgtctctccccctgaagttattggca

SEQ ID NO: 297 - DNA, 61 bp, Homo Sapiens
actcgctgctgcatacagggatcctgctatmtgttgcttctctgaatgtcaacaccaggac

SEQ ID NO: 298 - DNA, 61 bp, Homo Sapiens
ccaggaagaaatggccattagctgaaatgaragagtgtcagggctagaaacaaggatgtgg

SEQ ID NO: 299 - DNA, 61 bp, Homo Sapiens
gtatttgatgacacaaaattccagttctaaygttgggcatcaacttctagcactacgagtg

SEQ ID NO: 300 - DNA, 61 bp, Homo Sapiens
aggagctggagaaagcggtccttccaattaytgcacaaaatcctgagctgcccatgtgtag

SEQ ID NO: 301 - DNA, 61 bp, Homo Sapiens
tatgcctagatacatcataatcaagtggccraatatcaagacagaaaaaaaaatctttaaa

SEQ ID NO: 302 - DNA, 61 bp, Homo Sapiens
atgatgtaacccagcctgtttacaggtgagraaatagaaatgatgggtcttagcaacattt

SEQ ID NO: 303 - DNA, 61 bp, Homo Sapiens
tgttagaggaccgtggacatcacagtcgtgrgcaaaggattgggaaaagagagatttggct

SEQ ID NO: 304 - DNA, 61 bp, Homo Sapiens
gtacccactctgtttagggcagtaaactagrattagtggatccacagagggaagctttctt

SEQ ID NO: 305 - DNA, 61 bp, Homo Sapiens
ttgaaatgacaaaattatagaaatgtaggayggactagtataaggaaggggggcaaggggt

SEQ ID NO: 306 - DNA, 61 bp, Homo Sapiens
cttgcatctcttgtcatgattctcagtcttyatgacttggtgaagttgctgggcaggtatt

SEQ ID NO: 307 - DNA, 61 bp, Homo Sapiens
agggaggttacccccgtagcagcagttgctrgaaccagagtcatgggtgtgaggaccctgc

SEQ ID NO: 308 - DNA, 61 bp, Homo Sapiens
ttattgatctcaatgtcctaagcatgttaartctatgaactcaatcaagtccccacaccaa

SEQ ID NO: 309 - DNA, 61 bp, Homo Sapiens
ctctagtctctggggacccctggggggaagragtctaccctgcttgtgagtcccgtctcag

SEQ ID NO: 310 - DNA, 61 bp, Homo Sapiens
tattgcagcactatttgtactaggaaaaaaytagacatgacctatcattggagaatgaatg

SEQ ID NO: 311 - DNA, 61 bp, Homo Sapiens
agccagggcaggctgaaatcagggcttcctraacagatgtgttctttgtccctgggacaag

SEQ ID NO: 312 - DNA, 61 bp, Homo Sapiens
agtgaagttggcacagtgggcagttaataakgtcggctctgaatcaggaaaacctgggtcc

SEQ ID NO: 313 - DNA, 61 bp, Homo Sapiens
atgaataagagccatggggaaccatagctgyagggaaaccgtgatgcctgccagcaaagga

SEQ ID NO: 314 - DNA, 61 bp, Homo Sapiens
ggaaatataaccagtaccaaaatctaggacyagctggaaggtgggtgggcatgtgggacta

SEQ ID NO: 315 - DNA, 61 bp, Homo Sapiens
tttgaatgatctgataaaaatccttggttaytccactgaaccgactgcaatttttttaatg

SEQ ID NO: 316 - DNA, 61 bp, Homo Sapiens
ggagtacagtggtgtgatcacatatcactasagccacaatctcctgggttcaattgatcct

SEQ ID NO: 317 - DNA, 61 bp, Homo Sapiens
cttagggcagtaggggaaactccacactccrgattctttctctaaaaacttttatgagtag

SEQ ID NO: 318 - DNA, 61 bp, Homo Sapiens
gggtcctgaggggctcttaacttctagttcyttcctatttcagtttatccatgtggaactg

SEQ ID NO: 319 - DNA, 61 bp, Homo Sapiens
atggaagtgaaaaaaatacaagatgtgttcrggaaatcacaaaattctgcttggctggaca

SEQ ID NO: 320 - DNA, 61 bp, Homo Sapiens
atttaggattagggacttggaaatagattgmgactggatatagctttagtgttaacatgct

SEQ ID NO: 321 - DNA, 61 bp, Homo Sapiens
cacagggagattaacttgcccaagttccttrcaatgtatgtctgataccagagcccaccat

SEQ ID NO: 322 - DNA, 61 bp, Homo Sapiens
ttgattttcacagataaacattttgaacatyggtacttgaggggaaaaaaaataaggctaa

SEQ ID NO: 323 - DNA, 61 bp, Homo Sapiens
attacctattagcaatctgctaggattgtcrtcttacaaattggaggtgggaactttgacg

SEQ ID NO: 324 - DNA, 61 bp, Homo Sapiens
atttttttcatctgtccttaaatgctctgtrtatatgaacttcaacttctttattcaatcc

SEQ ID NO: 325 - DNA, 61 bp, Homo Sapiens
gctcaaatacaatttccagcatgaattgagyggtggaaatcggatctgaccacaacactgc

SEQ ID NO: 326 - DNA, 61 bp, Homo Sapiens
cccagttaattccccacatgaaaatacctayatgttggtggaaaagtgtaatgttcaagaa

SEQ ID NO: 327 - DNA, 61 bp, Homo Sapiens
gcatggcagagatgaggttgaagaagtttgytgggatcaagtctaaactggctttgtgtta

SEQ ID NO: 328 - DNA, 61 bp, Homo Sapiens
tccaggtgcaaataaatgccagggacagctyacctgggccagtatttttatttgagttctt

SEQ ID NO: 329 - DNA, 61 bp, Homo Sapiens
tgctacagctgaaaagtgtctccatgaagcsgttctagtggcaggaacattaagaggaaat

SEQ ID NO: 330 - DNA, 61 bp, Homo Sapiens
aatattatttgatggcctaaaaaaacttaamactgtctccaagaagaaaaaaagaagtgct

SEQ ID NO: 331 - DNA, 61 bp, Homo Sapiens
ttctaccctgaagccccccatcatgcctcasagacctcggttcattcctgacgatcacttc

SEQ ID NO: 332 - DNA, 61 bp, Homo Sapiens
tctaggggaagacaatggcatctgctttcayggctggtaggatggctttagagagtaagac

SEQ ID NO: 333 - DNA, 61 bp, Homo Sapiens
gaggaccaaggccttgaatgccttgttcacktctgcatccccaacacttaggatgacactc

SEQ ID NO: 334 - DNA, 61 bp, Homo Sapiens
tgtatctggggaaagggccagtaagttccamataagaacattaataaaacaaggaaaccat

SEQ ID NO: 335 - DNA, 61 bp, Homo Sapiens
gctaattgagcttctctttctcgcacctgcytaatgaccccactgcagcctgccgccactg

SEQ ID NO: 336 - DNA, 61 bp, Homo Sapiens
tttaattctttactctgaaaacctaggactrtaattgtgaacctacctataccgcatgcct

SEQ ID NO: 337 - DNA, 61 bp, Homo Sapiens
ggtgtccgaaacaatcaacctcaccaatatstctgaaattcaactatttatatttccatcc

SEQ ID NO: 338 - DNA, 61 bp, Homo Sapiens
tactatgaatctatttcaagaccaatgaagkctgaagtaagacctaactgttgccttgcca

SEQ ID NO: 339 - DNA, 61 bp, Homo Sapiens
actcttcttataattaacataatcccatctscttcagatttgcctttgtttttccttggtg

SEQ ID NO: 340 - DNA, 61 bp, Homo Sapiens
gttgggtctcagcaaactctctggcctcttsttcaatttgccctctgcatactgggaaggc

SEQ ID NO: 341 - DNA, 61 bp, Homo Sapiens
tgttatcatacttttaacagcaaccaataayggattgtaaagtgtaaaggcacaggttact

SEQ ID NO: 342 - DNA, 61 bp, Homo Sapiens
tgtaagaatattattttagaaaacccaacayaaaactgcaaatacagctccggaagccctt

SEQ ID NO: 343 - DNA, 61 bp, Homo Sapiens
cttctctgatttattcaacttctattttgcstctaccttaaggttaaaaaaaaaaaaaatg

SEQ ID NO: 344 - DNA, 61 bp, Homo Sapiens
attctgctgcttctttctaggttagactttkggattcttagattctaaaggccagacggac

SEQ ID NO: 345 - DNA, 61 bp, Homo Sapiens
ggttaaggcgttggttctacaactccagaaraaaaatgagcaatgctttatggtgcagcag

SEQ ID NO: 346 - DNA, 61 bp, Homo Sapiens
ttcagtcatgaagactggcttgccaaatttrtaccttcttcaaatctcccagggataactc

SEQ ID NO: 347 - DNA, 61 bp, Homo Sapiens
ctattattcttattagttgaaaaggagtggyttgttttgcagttcttgcctgcctgtttac

SEQ ID NO: 348 - DNA, 61 bp, Homo Sapiens
ttgccaagaatattatgaatttttgatgttyttctatggatgagctacttgggcttagctc

SEQ ID NO: 349 - DNA, 61 bp, Homo Sapiens
cccactcctcattactatgacaaatttcacrttaactcaattgtcagaccctttccctgct

SEQ ID NO: 350 - DNA, 61 bp, Homo Sapiens
aaaaaaaaaaagaaaaaagtgtcttttattyccaagctagcataagaatgttgaggtaacc

SEQ ID NO: 351 - DNA, 61 bp, Homo Sapiens
aattaatggaaagtattcatttccagagatsactaaaaatcagagattagaatttctgagc

SEQ ID NO: 352 - DNA, 61 bp, Homo Sapiens
gatgtttggagcaaccagctgaggttgttgwtgtggatatacaatctagaaaatttggctt

SEQ ID NO: 353 - DNA, 61 bp, Homo Sapiens
tgttcttcatggcgttgctatactcttcatrttacacaggctgcttagcgatatgtcagaa

SEQ ID NO: 354 - DNA, 61 bp, Homo Sapiens
ttcaaatgcaagtgaaaacattcatgtcctrtagcttgagaccttactacatataatatca

SEQ ID NO: 355 - DNA, 61 bp, Homo Sapiens
tatgctggggtatgagatcatgtttggaagsgacaaaaagtagcttctataatttatacaa

SEQ ID NO: 356 - DNA, 61 bp, Homo Sapiens
aagcaagacatcaagatcttcccaaaggagyggattctctgcctccccctttgcctgtggc

SEQ ID NO: 357 - DNA, 61 bp, Homo Sapiens
ctaggggagaaatgggggtatggctattgtsttaagtagtaaattatcatttgatatttaa

SEQ ID NO: 358 - DNA, 61 bp, Homo Sapiens
taatgttttcagtataagtgtagcactagcsaaaaggcacttaagccagccacagttaagc

SEQ ID NO: 359 - DNA, 61 bp, Homo Sapiens
ggacaacatgtgatagtcagcagtacctccratagaaacaagtgacatccattgcccctgc

SEQ ID NO: 360 - DNA, 61 bp, Homo Sapiens
ggcatttcagctgtttaaaatggtaaaaatwtaggcttctatgtccttttttcccagaatt

SEQ ID NO: 361 - DNA, 61 bp, Homo Sapiens
cctgggttatgcctagggatcacagttatgmttaggattggctcaaggagagttttatctt

SEQ ID NO: 362 - DNA, 61 bp, Homo Sapiens
ttccttggctgtcagtgctgcccagattcasaagaatattgcccacatttcactgtatttg

SEQ ID NO: 363 - DNA, 61 bp, Homo Sapiens
cgactctttgcactttaaaaaagatattagmaaccacagaagaaaaaaaaaatttttttaa

SEQ ID NO: 364 - DNA, 61 bp, Homo Sapiens
tactgtgatgaacaatagcgaaaagctctgraagtgattaacaaagataatgaggtgacag

SEQ ID NO: 365 - DNA, 61 bp, Homo Sapiens
tacgcatatacataatcattagtgaaaaatmtgtttacagaggtgaattacatgtcacatt

SEQ ID NO: 366 - DNA, 61 bp, Homo Sapiens
acaaagttcacccagttaaatggtacaactyaatagttttttgtgtatttacacaggtgtg

SEQ ID NO: 367 - DNA, 61 bp, Homo Sapiens
caaatatttgaattacacaaggcaccatttmggttacaagactggtagcatacagcatgtt

SEQ ID NO: 368 - DNA, 61 bp, Homo Sapiens
atctgtatgaaattttgaaagacatgatgtrtagtcaacttacaatgggcttcattatact

SEQ ID NO: 369 - DNA, 61 bp, Homo Sapiens
cactctattatgctgaagtatctcatggtgstttgtgatagcattaagagttcatctatcc

SEQ ID NO: 370 - DNA, 61 bp, Homo Sapiens
gacttgtcaaagtctcatgggcagtgattgmgaactccttagatttcagtttctttgttga

SEQ ID NO: 371 - DNA, 61 bp, Homo Sapiens
gaatagtaagccagagaagactttcacccaratttcaggatgtcaggtggcaagatgggtg

SEQ ID NO: 372 - DNA, 61 bp, Homo Sapiens
atggattccagctagcagaagaatacttcamctcagattggctgttaggcattgctagaaa

SEQ ID NO: 373 - DNA, 61 bp, Homo Sapiens
tcaagaaatcctcctgccttggccttgaaamtgttggggttacaggtgtgagccactgtgc

SEQ ID NO: 374 - DNA, 61 bp, Homo Sapiens
aagtctaatgatactaatggagataagtacmaggctaattacacatgtttacccaacgcta

SEQ ID NO: 375 - DNA, 61 bp, Homo Sapiens
acaattgagtttttctacttgagagcagtayattaaatgctttgaccaatgtctgttatgt

SEQ ID NO: 376 - DNA, 61 bp, Homo Sapiens
gcaatgatagagaaaaatccaaaatgtgaaygagccagctagctgtcacctgcatgcagcc

SEQ ID NO: 377 - DNA, 61 bp, Homo Sapiens
aggccttcagctcttctcagctcaccttttyctccagtgaataaacatgatgctgttttta

SEQ ID NO: 378 - DNA, 61 bp, Homo Sapiens
ggtcagatatgtcctgggagcctgtggctaytgatcctattgcctcggtcatcagccctcc

SEQ ID NO: 379 - DNA, 61 bp, Homo Sapiens
taatagtacttcagatgacatattttggagyttctattcaaggtggtcctggagaaaatga

SEQ ID NO: 380 - DNA, 61 bp, Homo Sapiens
caaggccgctaagtttgctcttacccaccaygtgcagagtgtctcctgggtgcttagttaa

SEQ ID NO: 381 - DNA, 61 bp, Homo Sapiens
ccaaactgtttctccaacaaaatacagaggrtacaaaggaataggaatgatttttgcaaca

SEQ ID NO: 382 - DNA, 61 bp, Homo Sapiens
ctgccttggctgaactcgcatgaggccatgycatgatgatcacagggacttctgtgaagga

SEQ ID NO: 383 - DNA, 61 bp, Homo Sapiens
tgacaagtcttctggggaactgaggagctcrgtggtgaacctgtatcttgccatccctgca

SEQ ID NO: 384 - DNA, 61 bp, Homo Sapiens
cgtcacagagggatcgaacttcattttggcwactttggcgatggctgcaagaggacagaga

SEQ ID NO: 385 - DNA, 61 bp, Homo Sapiens
acagctccagatatctccttctgtccgactrtgcttcagacaataagttctgcagacataa

SEQ ID NO: 386 - DNA, 61 bp, Homo Sapiens
ggggaacaagaacatgaaagcatccaaactrtcataggcactagcattttaaatgatgaca

SEQ ID NO: 387 - DNA, 61 bp, Homo Sapiens
gcacatagcccagctctctctcatgcccacmgatactttaagcttctattgacttaaagtg

SEQ ID NO: 388 - DNA, 61 bp, Homo Sapiens
gatccagatgctcattgtgtggggatgaaaygtcatgttcccaaaggaactggctcattgt

SEQ ID NO: 389 - DNA, 61 bp, Homo Sapiens
gcaggaataaggcaaacaaacacttcatgcygagcaaaacatcccaaacaactttcaggaa

SEQ ID NO: 390 - DNA, 61 bp, Homo Sapiens
ggagacggtttgcctttctcctatcacttgrtatcattactctatcccatcatttccaatt

SEQ ID NO: 391 - DNA, 61 bp, Homo Sapiens
ttagggtgtgaaacctgtgaacatatccacrtcttttcctttgtgttcatttccttttctc

SEQ ID NO: 392 - DNA, 61 bp, Homo Sapiens
aaatgtttaccattttaactatttttaagcstgcaattcaatggcattaagtacgttcata

SEQ ID NO: 393 - DNA, 61 bp, Homo Sapiens
ttactgttcttatagttttaggcactttacrtacttatccttacaattcagagatggaaat

SEQ ID NO: 394 - DNA, 61 bp, Homo Sapiens
taccacaggaaatggtaccctgatgagacgyaggtcaagtaggttttgatggagaagaggt

SEQ ID NO: 395 - DNA, 61 bp, Homo Sapiens
tggctttgaggtgaagtgggctcaagcgacstagccatatagcctgggagcatatatagtg

SEQ ID NO: 396 - DNA, 61 bp, Homo Sapiens
accctggactgtgtcagccccttttagatgkgttctacagcggccacgtgaggattgcagc

SEQ ID NO: 397 - DNA, 61 bp, Homo Sapiens
tgacctaattcatacagcttgttaattagcrgcccctctacaaatagttgtgtggtggaat

SEQ ID NO: 398 - DNA, 61 bp, Homo Sapiens
aggctagtttaagctgcagtaacaaatcccsaaaatctccagtctagcttaaaacaacaaa

SEQ ID NO: 399 - DNA, 61 bp, Homo Sapiens
agatctcattttaatttacattttttctgaygactaattatttgaacatgtcttcataggt

SEQ ID NO: 400 - DNA, 61 bp, Homo Sapiens
agagacagagaagaaaccagggaccagttcwttccggctacacaggccatggcaaggactt

SEQ ID NO: 401 - DNA, 61 bp, Homo Sapiens
aaagctttaataaagtttgctaagggactcyggggtgctaagttggagggattctcatgag

SEQ ID NO: 402 - DNA, 61 bp, Homo Sapiens
tttaaaaaaaaacaaacaaagaactcgagargtacaccacagagaaaacagtacctacctt

SEQ ID NO: 403 - DNA, 61 bp, Homo Sapiens
gtgagaaagctgttgttagctaaatggattmtcttcaatcaaagtacacgagctatggaca

SEQ ID NO: 404 - DNA, 61 bp, Homo Sapiens
ttaaatctttcccattagcctataaacttayttcctgctatatccccagtcttttaaacag

SEQ ID NO: 405 - DNA, 61 bp, Homo Sapiens
cgaggttattatacgactttaaaacaattastgcagacttttaggtgaaaatactgacccg

SEQ ID NO: 406 - DNA, 61 bp, Homo Sapiens
aacacacattttcacaatactaaaataaatkccccagttgggtgcagtagttcatgcctgt

SEQ ID NO: 407 - DNA, 61 bp, Homo Sapiens
gaagagaccttattttgcttgctcccgtaawttcttcaacttttccagttcagatgtttgt

SEQ ID NO: 408 - DNA, 61 bp, Homo Sapiens
agtatatacggctgaagcagagttagatcaygtagtaccttgtaaattgggttaagaattt

SEQ ID NO: 409 - DNA, 61 bp, Homo Sapiens
aaacctgtcctatgacaccctccatatactrcataatagccaaagacatattaagcctatc

SEQ ID NO: 410 - DNA, 61 bp, Homo Sapiens
gtagttgatgagcaagaaatgttctccttcyatggttcttcactcacaattatgacttgac

SEQ ID NO: 411 - DNA, 61 bp, Homo Sapiens
aataagagttcaactaacatttaccagacamatttttgagatggagtcttgctcttgttgc

SEQ ID NO: 412 - DNA, 61 bp, Homo Sapiens
agcattgagtcctttagaaaacaggaagtakgcatctgaaggtattgagtgagaaaaaggt

SEQ ID NO: 413 - DNA, 61 bp, Homo Sapiens
tatgttgcactgcaaaacaaaacacgctaaygttgcataatgaagtggttcccaggattta

SEQ ID NO: 414 - DNA, 61 bp, Homo Sapiens
caggggtgtttgggaccacatttgtcctttwgaggtgcctcttgtggcaaacagcgttttt

SEQ ID NO: 415 - DNA, 61 bp, Homo Sapiens
tgtgtatacagaatgaagtaagacatggagkatttgatccagaaaactcttgagactgaat

SEQ ID NO: 416 - DNA, 61 bp, Homo Sapiens
gaggaatggagagttgctgttttcccagaamgaagctcttggcttccttcgacaggaccag

SEQ ID NO: 417 - DNA, 61 bp, Homo Sapiens
tctgtaaaagttctggcatggtgaaagatcstaactctaggaagctgaataacttaccatt

SEQ ID NO: 418 - DNA, 61 bp, Homo Sapiens
tcagaaaaatgccaaggcttactctctcctktggttgaattcattactaacagagtgttta

SEQ ID NO: 419 - DNA, 61 bp, Homo Sapiens
gttgtctagaaggctggggagagcattccargtgagagggaaaggccttgccctttgagga

SEQ ID NO: 420 - DNA, 61 bp, Homo Sapiens
gaatttaaagccatgggaccagaagaaattrtgtaaaatgcaggaagaaaagaaagatgca

SEQ ID NO: 421 - DNA, 61 bp, Homo Sapiens
agcggtctcttttggagctgcaagctgtgcygcctgtgcttgtagaggggtgacagaagca

SEQ ID NO: 422 - DNA, 61 bp, Homo Sapiens
agtgttggcagcactgaattccaaaatcctgyagttgcctgctctacctcccacaagccca

SEQ ID NO: 423 - DNA, 61 bp, Homo Sapiens
agcttgcacatccacaagaccagcccaatayacagctagagtgcaaactgaggaggccatt

SEQ ID NO: 424 - DNA, 61 bp, Homo Sapiens
agggacctacaaaaataccaaaacaaaaggkcagatttactcagaagattcgtgatgaact

SEQ ID NO: 425 - DNA, 61 bp, Homo Sapiens
ataaataaataaataaataaagagtgtataygaggaaaattatctggaagactatagtggc

SEQ ID NO: 426 - DNA, 61 bp, Homo Sapiens
gtcaattgctgtcatcactttgttgcactgmaagagttcaattataccacaaagaatttta

SEQ ID NO: 427 - DNA, 61 bp, Homo Sapiens
tttcatttttttctctctaagaaatggctargaaagatcatgttttattgatgctaagatg

SEQ ID NO: 428 - DNA, 61 bp, Homo Sapiens
attatgaaatgagttgtattggaactttccytgacagaaatcctactcctctagcttggga

SEQ ID NO: 429 - DNA, 61 bp, Homo Sapiens
gtgaattctgttccacagatctgtatcagamaacttggttataatatcacatatagtagat

SEQ ID NO: 430 - DNA, 61 bp, Homo Sapiens
agaactccttataaagtgtcaagggacgggrtatgtgtaacaaggtaggaagaaggactaa

SEQ ID NO: 431 - DNA, 61 bp, Homo Sapiens
catttgatactagtaatcattttatcttctrtgaaacaccttttccccccaggttttggga

SEQ ID NO: 432 - DNA, 61 bp, Homo Sapiens
ggacagaggtgtacacagctctctcacggcycgcgggcagggggacatcacctgtctgact

SEQ ID NO: 433 - DNA, 61 bp, Homo Sapiens
atgggtcaagttccatattttactcaaatgycttgggtgagaacagaataagcagaactgt

SEQ ID NO: 434 - DNA, 61 bp, Homo Sapiens
taaaaagaaattttaatgggcttcagttccraatgtggactgtgataatgatttaccagag

SEQ ID NO: 435 - DNA, 61 bp, Homo Sapiens
ttgaataaatctgtttgtcctctcccttackgatggacacgtgggttatttcagattgggg

SEQ ID NO: 436 - DNA, 61 bp, Homo Sapiens
aatgcacaggacagccccccacaacagcggyctattcaataaaaatgtttgcaacttctga

SEQ ID NO: 437 - DNA, 61 bp, Homo Sapiens
acaccattatctacccagtcacttaagccastagcccaagatccaatctagctttctgtca

SEQ ID NO: 438 - DNA, 61 bp, Homo Sapiens
tgtcatatctattcctggcatactcttcatrcatagtcacactgcaatgtagacacaatca

SEQ ID NO: 439 - DNA, 61 bp, Homo Sapiens
ttcagaatagttaagtaagaatcatgtataraaatcagcaatagagcagggcatggtggct

SEQ ID NO: 440 - DNA, 61 bp, Homo Sapiens
gtcctgtatttctcactaggagaatagtggrattttgattttgttttatagggattgcttt

SEQ ID NO: 441 - DNA, 61 bp, Homo Sapiens
aaaagtctgtgcattgcaataactgctactrtcccaattttatgccaaaataaaccagctc

SEQ ID NO: 442 - DNA, 61 bp, Homo Sapiens
tctaatatgcagtctcgctccttgatgaatytgtatctgatcccttaaaatgcttccatct

SEQ ID NO: 443 - DNA, 61 bp, Homo Sapiens
aatgattctggatccaatgtctgttagattktcaaggttcctacaggaatacctctagaaa

SEQ ID NO: 444 - DNA, 61 bp, Homo Sapiens
tgctacattgtacatttgtcattcaaagtcrttataacaaatgccattaaaggctagattg

SEQ ID NO: 445 - DNA, 61 bp, Homo Sapiens
ttcttattatgtaaatttatagctaactctyattctgaactgtactttcctgtacatgccc

SEQ ID NO: 446 - DNA, 61 bp, Homo Sapiens
agagaatttttaaattttggtgtagtcctaygcagcattgtagttgaaagttctaaggacc

SEQ ID NO: 447 - DNA, 61 bp, Homo Sapiens
gatcttacctcaagctgatgcacaattatgkattcatcccagtgctttcagggtagcctag

SEQ ID NO: 448 - DNA, 61 bp, Homo Sapiens
gctagcagggtgggtccaccagtgaagcaartaatctgtggcctgcttataggtgggggcc

SEQ ID NO: 449 - DNA, 61 bp, Homo Sapiens
ctgtttggctgcatttctaggtagatttcastctaactcccagagaaactgggaaactggt

SEQ ID NO: 450 - DNA, 61 bp, Homo Sapiens
cagtcatgctggcaggacatcttctctggtwgaatcatgacagggagagtgtgagagcttg

SEQ ID NO: 451 - DNA, 61 bp, Homo Sapiens
ttttgtggctatgttattctttttcaagccraatctcaggcagaatctacgtatatagaaa

SEQ ID NO: 452 - DNA, 61 bp, Homo Sapiens
acttgccaggggtcttagtggagactatgtraggagcttgaaataccatcatcctactctg

SEQ ID NO: 453 - DNA, 61 bp, Homo Sapiens
aggcatcagtgctcaaggcacctaggctagygagtctcatgcactttcctccatgcagctt

SEQ ID NO: 454 - DNA, 61 bp, Homo Sapiens
acatgtcttataaactgcctgagcaatcaaraagatgaaggaaagggtgaggtggtattgg

SEQ ID NO: 455 - DNA, 61 bp, Homo Sapiens
actggacagcccatagaatttacaaactcartaaacagataataatatggtcatgatgggt

SEQ ID NO: 456 - DNA, 61 bp, Homo Sapiens
acatcctgagaaacactaactttaactcaayttgcctgatctttccagtgcactggacagc

SEQ ID NO: 457 - DNA, 61 bp, Homo Sapiens
ggtgcagtgtggggatttggatgcagcaggytgagttttcttaagctatttatcctgcaca

SEQ ID NO: 458 - DNA, 61 bp, Homo Sapiens
caccagcctggtcactatcacatggaccccrttctagtgtgtcagtatctttccttaaggg

SEQ ID NO: 459 - DNA, 61 bp, Homo Sapiens
aataaacaatttgataagctttttatttgayggtttccacgagataatcatttccatcaag

SEQ ID NO: 460 - DNA, 61 bp, Homo Sapiens
tcttcccacacgtttatggacaattttaagkaagtccttagtagcactgatgcagggctta

SEQ ID NO: 461 - DNA, 61 bp, Homo Sapiens
tatttttggtgggaatacaaagggttaagaragaagtcagctgataattcgtaattgaatt

SEQ ID NO: 462 - DNA, 61 bp, Homo Sapiens
ccacctaagtacctggtggcaccacaatgayagtcagactctgcacggttctaaacatttc

SEQ ID NO: 463 - DNA, 61 bp, Homo Sapiens
tgatctctttataacactggagttagctgarattcaattgggtattcaattattacctcag

SEQ ID NO: 464 - DNA, 61 bp, Homo Sapiens
agacacttctcttctcttctcagttgttatytgtgtccacagaggatgcaaaaggaaggta

SEQ ID NO: 465 - DNA, 61 bp, Homo Sapiens
cagatggaatgaaattgccacctggatgggwaactacaaatgacaatacaagctgggaagg

SEQ ID NO: 466 - DNA, 61 bp, Homo Sapiens
cgaggatgacactgatggtgacgatactgaygatagtaataacacttactgaatactcact

SEQ ID NO: 467 - DNA, 61 bp, Homo Sapiens
agtcatggtcagaattcctggatttcaccaytgtgcccatggcattcaacaagaatgtgtt

SEQ ID NO: 468 - DNA, 61 bp, Homo Sapiens
cagtaaatgacacattatacatgagctcacyaataaccaacattatcccaggcagtaattt

SEQ ID NO: 469 - DNA, 61 bp, Homo Sapiens
ctgtttgttgcctaaacttggtctgcatgaytactttactgatccaggaaactcattttat

SEQ ID NO: 470 - DNA, 61 bp, Homo Sapiens
gaattctgtatgaaatatgttaatcaacgtrgcctcttaaggtgtctagttttattaatta

SEQ ID NO: 471 - DNA, 61 bp, Homo Sapiens
aaatttacatgtataagtcaaaatgatctgsacttaattcctagcagataggtatatcttt

SEQ ID NO: 472 - DNA, 61 bp, Homo Sapiens
catactagtaagtctatgaactgtagtctcyggtgtaatcaaaaagacatgcttcttttca

SEQ ID NO: 473 - DNA, 61 bp, Homo Sapiens
ttaatttgaaagcctctctgttgctgtagayttgcagaagatttgcggtggatattttgcc

SEQ ID NO: 474 - DNA, 61 bp, Homo Sapiens
agtcaccggcatttttggaatttcactaagygtcgttgctgtgctgtgcctcagcatgcag

SEQ ID NO: 475 - DNA, 61 bp, Homo Sapiens
cacgtgtggtcagatgaggatggcatgcagyggagggcatggtggaggggcatggtgagga

SEQ ID NO: 476 - DNA, 61 bp, Homo Sapiens
attgtagcattcctttcaaggatgacctacycctgaaataaaacagcggcactgaggcgag

SEQ ID NO: 477 - DNA, 61 bp, Homo Sapiens
caggctgtaggataatgtgttcctaatctcrtggtctttgatctcctaggttaggccaaac

SEQ ID NO: 478 - DNA, 61 bp, Homo Sapiens
gaaaacggggtgtctgtaggctagagtagayagggaaatcttttttttttctttctccctt

SEQ ID NO: 479 - DNA, 61 bp, Homo Sapiens
catggatagttaacattcagacaggcttatyttcaaatctggattctatttactgtgtgac

SEQ ID NO: 480 - DNA, 61 bp, Homo Sapiens
ttcacgaagcttgacatcctgcaatgacttytgcacaaaactcaaagtcagtaaaacttta

SEQ ID NO: 481 - DNA, 61 bp, Homo Sapiens
cccaaggaaccattgctaatgaatgacagtraggaaattgttccttttatggtagtatctc

SEQ ID NO: 482 - DNA, 61 bp, Homo Sapiens
tgtctgttacacattgattgctgttaaactraatgtttttcactctgtaatcaatactttc

SEQ ID NO: 483 - DNA, 61 bp, Homo Sapiens
ctttgtgtttcatgcgactaccattctagawcaattttaaaaagcactactaccttaagaa

SEQ ID NO: 484 - DNA, 61 bp, Homo Sapiens
ataaatgttaactcagtaaagtcacttctgmaaggggctgagataatatggcttaggtatt

SEQ ID NO: 485 - DNA, 61 bp, Homo Sapiens
cttaatagaagacacgtgtattttcacatcygcttcagcatttaatctgttatgacagaac

SEQ ID NO: 486 - DNA, 61 bp, Homo Sapiens
tgagtccttcagctcatgttcatctcccttyccttggccatttataggacgaattttttat

SEQ ID NO: 487 - DNA, 61 bp, Homo Sapiens
atccccttgaaagactgttgggcattagatytgagatactctattattgctatgtgtagca

SEQ ID NO: 488 - DNA, 61 bp, Homo Sapiens
accttggatatagcaggaatatttgtggacygagtgaggaaatgaatagagatggttccta

SEQ ID NO: 489 - DNA, 61 bp, Homo Sapiens
ttagtccaggtgagcaaattaccctgaatargtgtgtaggctccctccctgccaccgaggg

SEQ ID NO: 490 - DNA, 61 bp, Homo Sapiens
aatctgtatgttactatggtcactaaatgartaacaaggaaaataacccaaaagtactcag

SEQ ID NO: 491 - DNA, 61 bp, Homo Sapiens
aaaatgcaacaggatctaaactaactgaaaygaaaagcagcagaagttattaacctttttt

SEQ ID NO: 492 - DNA, 61 bp, Homo Sapiens
atactcagccgagatacccccgatttgttaygggatggcaaaaagatatttaaggctattc

SEQ ID NO: 493 - DNA, 61 bp, Homo Sapiens
gagaaagattaagggagcgtaggaggcagcyattttaacaatgaaaactatatagttactg

SEQ ID NO: 494 - DNA, 61 bp, Homo Sapiens
aactgttttcaggttgcaacagacaaggcaraaaacctttagcagtgaaactgaaaagatt

SEQ ID NO: 495 - DNA, 61 bp, Homo Sapiens
aaaaagtaaaatagatgtcatctgtcctgayggaaatacaaatcaaagccatagtgagata

SEQ ID NO: 496 - DNA, 61 bp, Homo Sapiens
gtggaaataaggacatttataggttcctcamagtacctgatgtccacaagtctattttgtt

SEQ ID NO: 497 - DNA, 61 bp, Homo Sapiens
ctatgaagcaggcctagtttcttcatctatstttaccggccaccaaacaccttagggtctt

SEQ ID NO: 498 - DNA, 61 bp, Homo Sapiens
gcaggagacagtagaacggccctaatcaagwccagcttcttcacaatccctgagagtcatc

SEQ ID NO: 499 - DNA, 61 bp, Homo Sapiens
atcccagcctccctacagttactgatgcgtwtaatctgctatttaatctactatcttccct

SEQ ID NO: 500 - DNA, 61 bp, Homo Sapiens
tcacttgggttggacttggcttacacacccrgctcaactcctgtatcagggactcaccact

SEQ ID NO: 501 - DNA, 61 bp, Homo Sapiens
aaaagtttattcagttttaatttctggctasagcttctttgctaagaataacaaatactca

SEQ ID NO: 502 - DNA, 61 bp, Homo Sapiens
tgaaaagattgattttcatagaagtgaatakttgagcatcaattttaggcttagaaagcct

SEQ ID NO: 503 - DNA, 61 bp, Homo Sapiens
aattaaaacaaaaaacattaaaagaaggatkccatgtctgaagtgatgaaaacaaaactat

SEQ ID NO: 504 - DNA, 61 bp, Homo Sapiens
ccctaatagcaggccttgaatagtgcaaaayagtcttcttaaatacattagtctttcttgt

SEQ ID NO: 505 - DNA, 61 bp, Homo Sapiens
aaacaacgagttatgcctctcatggaactcrgagaggaaagcaaactgggagactaactga

SEQ ID NO: 506 - DNA, 61 bp, Homo Sapiens
ataaaaggcagaataaattggattaaatgayggattggatatggtgaatgagagacagcaa

SEQ ID NO: 507 - DNA, 61 bp, Homo Sapiens
aaaactcagcaaaacagaaatgttgacagcrgttctgttgaaaccctgaaacttgacaggt

SEQ ID NO: 508 - DNA, 61 bp, Homo Sapiens
attctttttgctggtgaatcacttgaaaccrtcgtcctcaaactttttggttgcaggacca

SEQ ID NO: 509 - DNA, 61 bp, Homo Sapiens
tgcaatgaataaatctacaggacataagcasgaaaaagagcttctcagtttcttcagtatc

SEQ ID NO: 510 - DNA, 61 bp, Homo Sapiens
aatacctagaacagaatagggtgtagagttyatgctcaaaattatttgttgactggttact

SEQ ID NO: 511 - DNA, 61 bp, Homo Sapiens
gttcattgagaaacagtcattggtgtttagyccagcttgaacatttgccagtggatttttg

SEQ ID NO: 512 - DNA, 61 bp, Homo Sapiens
caatgcacttataattatcaactctgtctgstttttttaaatcccaccttcactatcacat

SEQ ID NO: 513 - DNA, 61 bp, Homo Sapiens
ttctggaaagaagattaaaaatgtcaaaaamggtgctagactgtgaagatgatatccccta

SEQ ID NO: 514 - DNA, 61 bp, Homo Sapiens
tacaaaataaagataacaagagtacctgtcwgatacagttataacaaaaggcaaatgagtt

SEQ ID NO: 515 - DNA, 61 bp, Homo Sapiens
ttctaaattttaaacaacctaatatcggaayctcctactaaaatgaggacaccattaactt

SEQ ID NO: 516 - DNA, 61 bp, Homo Sapiens
tgaaaataaatacatagtccaaaatcttctmgtggcccaattgttcagaatctatgcagga

SEQ ID NO: 517 - DNA, 61 bp, Homo Sapiens
atatatgaagttgggggacacagacattccraaaatagccagactctcatttatctaaaat

SEQ ID NO: 518 - DNA, 61 bp, Homo Sapiens
ctctgagtttaggtcagaaaaagtccaaaayattcagtctaagtagctgtctattctcacc

SEQ ID NO: 519 - DNA, 61 bp, Homo Sapiens
agtaccaggtcagcaatatctaatttttgcrccacatgagacagtcagaataatgtgtgag

SEQ ID NO: 520 - DNA, 61 bp, Homo Sapiens
tgtttaaaaatttaaagcatacttctaagayatagtggtgattctctatactagcatgaac

SEQ ID NO: 521 - DNA, 61 bp, Homo Sapiens
agagaaaacatcattcattccgtctttgcckcaccaaatatacattatgctgcttgcgtat

SEQ ID NO: 522 - DNA, 61 bp, Homo Sapiens
acattattcatatagaataaaaatgagaatrgcacaagttgatatccagtacataatgtac

SEQ ID NO: 523 - DNA, 61 bp, Homo Sapiens
aagcaatggcactcagacatatttgactgayctttatggattaaaagtcaagatatagggc

SEQ ID NO: 524 - DNA, 61 bp, Homo Sapiens
ttcagttaaaaagtaaagacaaaaagaaaartaataaatttccactttcaatatagtaaat

SEQ ID NO: 525 - DNA, 61 bp, Homo Sapiens
aaaaaagcattggagcattaggtctttgaargttggctagaatccaaacaagttgaagggg

SEQ ID NO: 526 - DNA, 61 bp, Homo Sapiens
tattttcttttttaaactaatgccatagttyaattatttaagccagacagctaaaactgct

SEQ ID NO: 527 - DNA, 61 bp, Homo Sapiens
cattcccgtctatttggttgtagataaaagrgataaggggcctctttctcaataactactt

SEQ ID NO: 528 - DNA, 61 bp, Homo Sapiens
attacatttcttatcaagtaagaataaacawctcatcatcaagtaaagtaatgtgactttt

SEQ ID NO: 529 - DNA, 61 bp, Homo Sapiens
taataataaaaattatgctcaaatgctgctyttatgccagatttttaaagaaccttaatct

SEQ ID NO: 530 - DNA, 61 bp, Homo Sapiens
catcatgtcaccatctttctggaccagtacrctcagcttttctgttcttgacctttttaac

SEQ ID NO: 531 - DNA, 61 bp, Homo Sapiens
tttttcaacgtggtaccacaaatgtggccasaaggattttcataatgggatattgtacata

SEQ ID NO: 532 - DNA, 61 bp, Homo Sapiens
ggatttaaattatagataagttttgggctayggcattctcaactgttgcctggaaaagcat

SEQ ID NO: 533 - DNA, 61 bp, Homo Sapiens
tagggttagtcaagctcaaaacaataagccmagtaggacacagcagtaccttaataaatac

SEQ ID NO: 534 - DNA, 61 bp, Homo Sapiens
catttccccccttctaaactctagcactggygtgaaaatactgccatttgtgggctgagat

SEQ ID NO: 535 - DNA, 61 bp, Homo Sapiens
aaaatctgatataatttttcagagtctgtgrcactaaggagtccacagggctgcctaggtg

SEQ ID NO: 536 - DNA, 61 bp, Homo Sapiens
aattacctctgccatggatacttgcaatagstagcaaactggtctccctggttcaactcct

SEQ ID NO: 537 - DNA, 61 bp, Homo Sapiens
atttagaatacttacaagggcattttaaagwctaattatgtagcatttattgtacagtgta

SEQ ID NO: 538 - DNA, 61 bp, Homo Sapiens
caataacttaaatacatcagcagagaaaacrttatgaggcataaggaccatgtggttctgg

SEQ ID NO: 539 - DNA, 61 bp, Homo Sapiens
acatggaaacgataatgcattgcgctatgaygttatgaagactaccatgtcgctaggcaat

SEQ ID NO: 540 - DNA, 61 bp, Homo Sapiens
gagagtcactatgttaaagtaattgggtgaraaagctattcccctgatatgctaagaacta

SEQ ID NO: 541 - DNA, 61 bp, Homo Sapiens
acgtctaacacagttgttttttgccctacarcttgtccccaatcatttcatctacctatta

SEQ ID NO: 542 - DNA, 61 bp, Homo Sapiens
catttcatctacctattagatattcatccawcattcaggaggtgcagtggagagaacacat

SEQ ID NO: 543 - DNA, 61 bp, Homo Sapiens
ttgttgtccactctatgattcagtgaattcraaaatacccaggtcatcatgagaagctgaa

SEQ ID NO: 544 - DNA, 61 bp, Homo Sapiens
aaaatctaaacatagtctaaaagttttggcrcttcaagagcttctgggggaaagaaaagaa

SEQ ID NO: 545 - DNA, 61 bp, Homo Sapiens
gatcaaattttgccctgcagcaaacttgtamatttttgccaggacccgtgaaacttcacaa

SEQ ID NO: 546 - DNA, 61 bp, Homo Sapiens
aattttaggaattagtgagagttacatcttwatccatttttactttagaacttattttttt

SEQ ID NO: 547 - DNA, 61 bp, Homo Sapiens
tctcaaagaattggcaaagggtgccgcaacrtaagtggatgaaagccattataatgggtga

SEQ ID NO: 548 - DNA, 61 bp, Homo Sapiens
aagcgcaagctctctttaaagaaaaagtagraaatgacaacagaacaagctcacattgtaa

SEQ ID NO: 549 - DNA, 61 bp, Homo Sapiens
cctttcctatattaaaaaatagatcatctgraactgaccctttatgagaatttatattttt

SEQ ID NO: 550 - DNA, 61 bp, Homo Sapiens
ccatgaagaatgtgcaatttgtactgttaartttgtgatgagattcttgaaaacttttatg

SEQ ID NO: 551 - DNA, 61 bp, Homo Sapiens
agtagggaagatgtttttgtcttttcagctstattccagataccttatatttctgtctcca

SEQ ID NO: 552 - DNA, 61 bp, Homo Sapiens
ttgttggtgtgagccactgaacctggcctaraatagaactgttaacaataactgtctttgg

SEQ ID NO: 553 - DNA, 61 bp, Homo Sapiens
tctttataaaagcagagattagtcttttcaygctacacacgctcattcatgactttccttt

SEQ ID NO: 554 - DNA, 61 bp, Homo Sapiens
gttcctgaaaaggaaagtaacagttgcagasatgggaagaaattttttttcaggtccccaa

SEQ ID NO: 555 - DNA, 61 bp, Homo Sapiens
ctctctccatgagcagaaggatcttgcagtytcactcaccactatatcctcaaagactgac

SEQ ID NO: 556 - DNA, 61 bp, Homo Sapiens
gttgtactttgaacaatcagaaaggccttayacaaatatgcttacataatgttaaggttat

SEQ ID NO: 557 - DNA, 61 bp, Homo Sapiens
taaaactgacatccaagggacatgtgaatgygagcccaagacatcagtaaagaaacaaatt

SEQ ID NO: 558 - DNA, 61 bp, Homo Sapiens
caataacatctttctgtgtcttcaaggagtrggtagacgaggtagactatgtatacattga

SEQ ID NO: 559 - DNA, 61 bp, Homo Sapiens
ccaagatactagtcaaggagatctggagtaraagttctagtagacccctctagctatgctg

SEQ ID NO: 560 - DNA, 61 bp, Homo Sapiens
acaggtgtctctgtaattgtgatacgttggkaaaattcacactgttaaatgagcctcaaat

SEQ ID NO: 561 - DNA, 61 bp, Homo Sapiens
tctccataatatttgtttaaattgaccacayggttagaaatgagaaatctaagatttttgt

SEQ ID NO: 562 - DNA, 61 bp, Homo Sapiens
aaatatgtttatgtgtatgtgtacctttttyctacatttcttctgttagagtttaaggact

SEQ ID NO: 563 - DNA, 55 bp, Homo Sapiens
ctttagtagaatatatctaagagaatctttwctgacttaactgtctctgtagcag

SEQ ID NO: 564 - DNA, 61 bp, Homo Sapiens
ctctttgaggtaaagctcagagactggtatracctttgcaagctgaatgtgactggttgcc

SEQ ID NO: 565 - DNA, 61 bp, Homo Sapiens
atgggtgtattatcattctaatccatcagcracttgggacttcaaaccatatcataaagca

SEQ ID NO: 566 - DNA, 61 bp, Homo Sapiens
gtcagcacttcaaggatatcattatgaatasggaatgtcatcaagcagcaggtacacagaa

SEQ ID NO: 567 - DNA, 61 bp, Homo Sapiens
caactctcctacttgatcatgtacaggactyaaaactgtaatcattaaaacccagatgatc

SEQ ID NO: 568 - DNA, 61 bp, Homo Sapiens
tagactagcagtaccattgacccaaatcacyggctaaatgtactacattatttactgctca

SEQ ID NO: 569 - DNA, 61 bp, Homo Sapiens
taaaattatatgtttaggtgcattaactatyaactcaaagaggattgtgaaaggcctcctt

SEQ ID NO: 570 - DNA, 61 bp, Homo Sapiens
attgttttcattatcctgcactgttttccartcccttaacattacttaacctgtttattta

SEQ ID NO: 571 - DNA, 61 bp, Homo Sapiens
ataagctcagttcaatttatttaagccccamaacaagaagaagcacagtttgccaagagcg

SEQ ID NO: 572 - DNA, 61 bp, Homo Sapiens
tagatactcggggtacatggtcattgagccygccctctcgttccttgttacatgtcaccgt

SEQ ID NO: 573 - DNA, 61 bp, Homo Sapiens
tggtatgttgacagcttagcaacggtacttsaatcacctctttaaaaaaacaacacaccac

SEQ ID NO: 574 - DNA, 61 bp, Homo Sapiens
aaatatagcagctacaatctaatttcattgraagtctcctccaaatcacagaagtgccact

SEQ ID NO: 575 - DNA, 61 bp, Homo Sapiens
tagtaaccaaaagtttaaaatgtgttttgtytaccaactggttgcatgtacatggttaatc

SEQ ID NO: 576 - DNA, 61 bp, Homo Sapiens
gaagatcatactcatttagagggatcgctcrggccgcagcaggaatgaatgggcatttgtg

SEQ ID NO: 577 - DNA, 61 bp, Homo Sapiens
ttatgcaccatctgaatacaagatactttaytggggtactgtggctgtaaagaggactaac

SEQ ID NO: 578 - DNA, 61 bp, Homo Sapiens
gctagtgaattaagcaaatatgaaatgacartgaagtcgtattaatggtttgtggtatgga

SEQ ID NO: 579 - DNA, 61 bp, Homo Sapiens
aatccaatcaacccttggtattgtcagtcckttaaaattctagccatttttatgggcatat

SEQ ID NO: 580 - DNA, 61 bp, Homo Sapiens
aaagccgtctaatgcctttcataaccatacrtttcctcattaacccaatcccctaaggcgt

SEQ ID NO: 581 - DNA, 61 bp, Homo Sapiens
cccgagctggattaaaatccaggtcacagasggactgttttctctcctctttcctgaaagg

SEQ ID NO: 582 - DNA, 61 bp, Homo Sapiens
acatagctagataagtgacagagccaggaasaggacttggtgctcctgatcctgaacttcc

SEQ ID NO: 583 - DNA, 61 bp, Homo Sapiens
gagccccaaagatagtgaaaaaatatccagsttccaagagaatgaagaagaataatagtga

SEQ ID NO: 584 - DNA, 61 bp, Homo Sapiens
ataacaggaatctgattatactgcaggtcarattatatcctaaagatatatttgtatagaa

SEQ ID NO: 585 - DNA, 61 bp, Homo Sapiens
gcaggagagcaacaatcctaaaagagatcaytatgactgcagacagtattgtgacttccgg

SEQ ID NO: 586 - DNA, 61 bp, Homo Sapiens
ataggtggctgtgttagcagactgaagtctstggtccaggattggagcctgatcattttta

SEQ ID NO: 587 - DNA, 61 bp, Homo Sapiens
ctaaagcagagaaagaacatcccagtgaaamtcaatggggaagtcacaaccacagcgaatc

SEQ ID NO: 588 - DNA, 61 bp, Homo Sapiens
cattcccagggttattcttggaagggccccrtcctcattgtccttttctaatctggggctc

SEQ ID NO: 589 - DNA, 61 bp, Homo Sapiens
agtatgtcctccatcccaattacacctggckttataaaatgaatgtacattttctatttgc

SEQ ID NO: 590 - DNA, 61 bp, Homo Sapiens
attattttcaaacaaacaaacaataggctgkagttgatattataccaataaggttatattt

SEQ ID NO: 591 - DNA, 61 bp, Homo Sapiens
  misc_feature (31)..(31): n is a, c, g, or t
ctactctaaggaatattcaggcacactcacntttttgattacatcttcttctaactttctt

SEQ ID NO: 592 - DNA, 61 bp, Homo Sapiens
catttttatttcattatatgcatcacggtaygtaggtcctttatggcatagtgaaatggct

SEQ ID NO: 593 - DNA, 61 bp, Homo Sapiens
attttagagccagcctttttcacctccatgytagtctgctattttgttttcataaattatt

SEQ ID NO: 594 - DNA, 61 bp, Homo Sapiens
aaaaagttttaagatagagtggacttaagcrtggtaatggatggagtgaggaaagccaaag

SEQ ID NO: 595 - DNA, 61 bp, Homo Sapiens
cctgagtagccctcttccaaaactgaagtcrgtgacacagtgacgttagcaaattgagaga

SEQ ID NO: 596 - DNA, 61 bp, Homo Sapiens
tcatagttgtcaagatttgacccacggagcygttaagatgagaagcctcagatttatttgg

SEQ ID NO: 597 - DNA, 61 bp, Homo Sapiens
gccataaataattctgtgtaggtgcatgaarggaagtgataggagaccacaaaaagatatt

SEQ ID NO: 598 - DNA, 61 bp, Homo Sapiens
tacagaatctttttctttaaatcctttgaaygtacctctttttaaagaaaaacaccaactc

SEQ ID NO: 599 - DNA, 61 bp, Homo Sapiens
gacgcaagacctaaaatcacgtttcatagayttcctaagcaaactgaagctttatgattat

SEQ ID NO: 600 - DNA, 61 bp, Homo Sapiens
tggtttcagcaaccatctgttttggtctcartgtgaaaggcaggcaaaactatgctgacaa

SEQ ID NO: 601 - DNA, 61 bp, Homo Sapiens
atgtgtggcccaagataattattactcttcratgtggcccaaggacgccaaaagattgcac

SEQ ID NO: 602 - DNA, 61 bp, Homo Sapiens
gcattggatacatatcagatgtatttacacygtgtccagaagtatctagaacaagaacagc

SEQ ID NO: 603 - DNA, 61 bp, Homo Sapiens
tgaattgtttttcaaaaacataaacatagaytgaaccatttctagaagatttcccagtttt

SEQ ID NO: 604 - DNA, 61 bp, Homo Sapiens
tgtttttatttatagtactcaaggtcagttrtagtgcattcacactattcattgaccctgt

SEQ ID NO: 605 - DNA, 61 bp, Homo Sapiens
gtgatttgaattcattttgtccagcagataytagtgagaagctcggccactgcttcatggc

SEQ ID NO: 606 - DNA, 61 bp, Homo Sapiens
tacttcaaagtttggctactgatattttgcyaatcatgagatattataacattgtgacttt

SEQ ID NO: 607 - DNA, 61 bp, Homo Sapiens
gcacattcacagctgcttcatgccatctacragctacaacagttccagagatagagtctgt

SEQ ID NO: 608 - DNA, 61 bp, Homo Sapiens
tcattccattgtgcagaagagtggaaaatcrattagcaactacaagcttgggtactgaaga

SEQ ID NO: 609 - DNA, 61 bp, Homo Sapiens
aaaaacaaacttctctatgccatagttctgmtttacagatggaccaggcatgagcgcttgc

SEQ ID NO: 610 - DNA, 61 bp, Homo Sapiens
ccatgttgaatgatcaaaaaggagaccagtrgtgaggaggtcgtaagagatgggcagtagg

SEQ ID NO: 611 - DNA, 61 bp, Homo Sapiens
ccattgagatggaatccttaaagattgtttycagttaaaatcctaggccttccctgagaag

SEQ ID NO: 612 - DNA, 61 bp, Homo Sapiens
gattgtttaaaactaaaatgtctgcacccaytgtgtgctgcagaaactgcagtaaaaataa

SEQ ID NO: 613 - DNA, 61 bp, Homo Sapiens
ccccagtccataggtttgaaattgcttctaytccatctacccacagagctagtgctgggct

SEQ ID NO: 614 - DNA, 61 bp, Homo Sapiens
ccctgatcatttcctttagcaatgactatgyccagttttcaccaggatgctccatcccctt

SEQ ID NO: 615 - DNA, 61 bp, Homo Sapiens
ttgtttgcctttactgtcaccatttagaatsctggctgatgaattgcatcccacggggagg

SEQ ID NO: 616 - DNA, 61 bp, Homo Sapiens
tcagaaaggatacaaaagtattcgtctgaascagctttaatttttttttttttcagcagaa

SEQ ID NO: 617 - DNA, 61 bp, Homo Sapiens
aaatcggtctacacagtattggttgggagtrtgtggtacgtgtgtacatccactatgtatc

SEQ ID NO: 618 - DNA, 61 bp, Homo Sapiens
atataagtagcctatataaccactttgtttsactaaaaactatgtttctttgatgcaaata

SEQ ID NO: 619 - DNA, 61 bp, Homo Sapiens
ccagtatctggctccagagtataaccatttrccaactttataactgtggcctcacatgtct

SEQ ID NO: 620 - DNA, 61 bp, Homo Sapiens
gatggccaggtcaacaaatgggtccatcacraccaggttgacaacatgtttcacttttaac

SEQ ID NO: 621 - DNA, 61 bp, Homo Sapiens
caaagagcctatcctttactctaatcacttyttacctggaattaccgaaatagttttcaaa

SEQ ID NO: 622 - DNA, 61 bp, Homo Sapiens
attctaggacaactgctagagcttttgaagraaacctgggccttttttctttcttctttct

SEQ ID NO: 623 - DNA, 61 bp, Homo Sapiens
aaataaaatatttaaagatgtatgctacctraaatgatgactctaaacagttttatctgtc

SEQ ID NO: 624 - DNA, 61 bp, Homo Sapiens
aagatcaggaacaagacaaggatatcgactrttaccacttctttttgacatagtactagaa

SEQ ID NO: 625 - DNA, 61 bp, Homo Sapiens
ctatgttaacttggcagcatgagaacctccrtacacaacctgacaagaaagacatgcatgt

SEQ ID NO: 626 - DNA, 61 bp, Homo Sapiens
tacatcattccttatgtacaatactttatcmatgccatttttatgatgttgtatactaggt

SEQ ID NO: 627 - DNA, 61 bp, Homo Sapiens
ttgatctcttgtattgcaagtggtaattcaygtggctatttcctctaacttgaatgtgaac

SEQ ID NO: 628 - DNA, 61 bp, Homo Sapiens
ttttcacatcaatatcagcagtttacctttytacatggcagtgttatattgaagaaacact

SEQ ID NO: 629 - DNA, 61 bp, Homo Sapiens
taaaaacttttaagtgatttttgggtctgcrtacacatgagagttaattattagcaggaaa

SEQ ID NO: 630 - DNA, 61 bp, Homo Sapiens
ctaacaaaaaccctgattctatttctgaaasaactttctccatcctcacatcttgacccat

SEQ ID NO: 631 - DNA, 61 bp, Homo Sapiens
ccatggaggctcctacatgccacagtaaggkctctgaattgtatttgataagcagtaggga

SEQ ID NO: 632 - DNA, 61 bp, Homo Sapiens
ctcattgtatgcttgctctgtgttcaacatwgtgcaggatgcgagatgaataagctatcat

SEQ ID NO: 633 - DNA, 61 bp, Homo Sapiens
ctttgccactttccttttaaacttaacagcrtatactggaaatcactccatatcgtgtcac

SEQ ID NO: 634 - DNA, 61 bp, Homo Sapiens
tatagcatttcagctgcactgtaggttaaaytggctctttgggctaatccaaactgtaatt

SEQ ID NO: 635 - DNA, 61 bp, Homo Sapiens
ggaacctaggaactaaaaacacatgttatcrtcccacacaaatccaacatacaataatgag

SEQ ID NO: 636 - DNA, 61 bp, Homo Sapiens
ttaatacaattaatgtctcctcgagttttcrtgcagatcaacacacctactgacagtaatg

SEQ ID NO: 637 - DNA, 61 bp, Homo Sapiens
ccagtggagtcaataaagcataaagtcaagrgtttctaaacacgacctgggtgcagatggc

SEQ ID NO: 638 - DNA, 61 bp, Homo Sapiens
gaactggagaacaataactggttaatatcarttaggagtcatccatcctgagcctggggct

SEQ ID NO: 639 - DNA, 61 bp, Homo Sapiens
tttatattgtaaaaatattatttacaactaraacacgagcttaatggaataatttatatta

SEQ ID NO: 640 - DNA, 61 bp, Homo Sapiens
aggcaatcagatgttcagcaaataacagttytaatcctttctaatccagatttttctttct

SEQ ID NO: 641 - DNA, 61 bp, Homo Sapiens
gcttgctaatacgacttaagagactctacayagccttatcccagttattacagacctcctc

SEQ ID NO: 642 - DNA, 61 bp, Homo Sapiens
ccatccgattcttgataggttttattgagcractttataacgtaaaactgcttttagagag

SEQ ID NO: 643 - DNA, 61 bp, Homo Sapiens
taatacctattgaactatcctactaaatgayattttgatgaccgtcaaggatgaagtgggc

SEQ ID NO: 644 - DNA, 61 bp, Homo Sapiens
acttgaataatcttttttggttatggtataygtagaaagggtgacactgctgtcccagagc

SEQ ID NO: 645 - DNA, 61 bp, Homo Sapiens
atgacaaattcctcttattacattctgggaygcaattatcaaaaactctaacagaaagtaa

SEQ ID NO: 646 - DNA, 61 bp, Homo Sapiens
gagccatggagcctgactcacattcttgccrtgacaaaggacagctgcatgtcaacatgga

SEQ ID NO: 647 - DNA, 61 bp, Homo Sapiens
atgtatagatgctatttgtccagtcaacgawaaacagtggatgtcaaccaggtgttgcagg

SEQ ID NO: 648 - DNA, 61 bp, Homo Sapiens
tcagaaatgtacattcaaaacaatcgaggtwggctttaaaggagcattcaaaatcattaac

SEQ ID NO: 649 - DNA, 61 bp, Homo Sapiens
accagctaacaacatgtcaggatcaaatctkcacatatcgatgttaaccttggacgtaaac

SEQ ID NO: 650 - DNA, 61 bp, Homo Sapiens
gtgtgtgttgggtgaggacaggaatggtcaygttgatgtgttcttctggtatagaaggcat

SEQ ID NO: 651 - DNA, 61 bp, Homo Sapiens
ctgttattaccaaagacctgcactctgacawcagtatcatttatttctgttgttgcagaaa

SEQ ID NO: 652 - DNA, 61 bp, Homo Sapiens
aacagaagataaagaaagtgtgttttaatcyctcttactcagaagcgaagtaaatcattaa

SEQ ID NO: 653 - DNA, 61 bp, Homo Sapiens
ggatttgaaaggtgaatgtctcaggaccagytttaacatacatctatatcctagtgtggtg

SEQ ID NO: 654 - DNA, 61 bp, Homo Sapiens
gtttataatagatatcagtaaaatccttaaygctttgctcaagttctagctaaagaattct

SEQ ID NO: 655 - DNA, 61 bp, Homo Sapiens
agactagtatctgagagcaagcaattgatgytctattccatattcaatcttatcaccccaa

SEQ ID NO: 656 - DNA, 61 bp, Homo Sapiens
tcacatgccaaccttgctactctatccaacsccagcaaagtaaaaaccaggcttacactca

SEQ ID NO: 657 - DNA, 61 bp, Homo Sapiens
tccatgtaattgtttaaaaaatgaaaattcmaagaactaaggctgaacaggcgtagaaatc

SEQ ID NO: 658 - DNA, 61 bp, Homo Sapiens
cttcacaccctggtggccagagtctgaaacyggttgttccagtaggtatcctgctgcttgt

SEQ ID NO: 659 - DNA, 61 bp, Homo Sapiens
aaatacagtgttctttggggcttttggtatkttatcagtgaggatagtggcaggtggctgc

SEQ ID NO: 660 - DNA, 61 bp, Homo Sapiens
catctccataggtaagggaattttgtctcayataggacacagaaggaataatttaggacac

SEQ ID NO: 661 - DNA, 61 bp, Homo Sapiens
ttcagttgaatacctgtgttgctactaatcrcttcatagctccttactttcctatttaaac

SEQ ID NO: 662 - DNA, 61 bp, Homo Sapiens
aaattgtgcaattcagggaatatggcaattkaaaaccagatgcttagaccactaagccatc

SEQ ID NO: 663 - DNA, 61 bp, Homo Sapiens
gaaattgagacactgaaaggctaaatgaaaytgcaaagcagggattcacatccaggccatg

SEQ ID NO: 664 - DNA, 61 bp, Homo Sapiens
actaacagctgatctcttggcagaaactgtraaggctagaagagagtaaggcccaatattc

SEQ ID NO: 665 - DNA, 61 bp, Homo Sapiens
acatatttccacaagagaccactcaatcatyctccaatcactgttgctaacggggtaggaa

SEQ ID NO: 666 - DNA, 61 bp, Homo Sapiens
gcagcctaggagaggaaaatagcttgtttayggagctggtaaagagaaagtagaggaattc

SEQ ID NO: 667 - DNA, 61 bp, Homo Sapiens
tcctccctacagaaccaagaagattcatacrtgactggaacctgaatgcagaaactctttc

SEQ ID NO: 668 - DNA, 61 bp, Homo Sapiens
aaaatgcagcagtgcattgacatttggaagkcttctggctcctttgtggtgtggatggcct

SEQ ID NO: 669 - DNA, 61 bp, Homo Sapiens
ctaattagacccaagatccatgttggtcttyacctgcgaagtactggtggctgttagcctt

SEQ ID NO: 670 - DNA, 61 bp, Homo Sapiens
agtgctgacttccagcttgtaggatttgacrtagtagccattctgtgtttccctggaaatc

SEQ ID NO: 671 - DNA, 61 bp, Homo Sapiens
gcccatccccaacaaactgaatttctcctcrttatttattgtcctttttcttctccaggac

SEQ ID NO: 672 - DNA, 61 bp, Homo Sapiens
acagggaaagggacacttctttttctaatgygtgaaagcctccattgaggtaacccaagct

SEQ ID NO: 673 - DNA, 61 bp, Homo Sapiens
cacctcccatgtgacctgatgctggagaaastgtggtttagcgggaggctgatggggaagt

SEQ ID NO: 674 - DNA, 61 bp, Homo Sapiens
gtcctctattaggttttacataatctccttytcaccaggaattgtgtcttattgactggga

SEQ ID NO: 675 - DNA, 61 bp, Homo Sapiens
attgcaaatgaggagaagcattctagtgatrggcttggattctcatgaccaacgatggtac

SEQ ID NO: 676 - DNA, 61 bp, Homo Sapiens
tcagtaactagagcagaaaagggtccaaaarcagatgaatctaccaatttatttgtgagga

SEQ ID NO: 677 - DNA, 61 bp, Homo Sapiens
tgcttaaatgtttaaataagcttcttgaaawctcatggaacattcaatcacaactccaaca

SEQ ID NO: 678 - DNA, 61 bp, Homo Sapiens
gtttaagctttagactcttcagttataggcytgatgaagaacccaagtcatagattcacat

SEQ ID NO: 679 - DNA, 61 bp, Homo Sapiens
caatgagagtgtgggactttatacgcaatgrataatgtatttgttttaaatgtatatatat

SEQ ID NO: 680 - DNA, 61 bp, Homo Sapiens
ttataatgaataaccatttcctaatttaatraaaccctatgccttaactgcaaatgttaat

SEQ ID NO: 681 - DNA, 61 bp, Homo Sapiens
ccaagtccaaaattcacatttaagctgagarcagctaggactttactatctatctatggtt

SEQ ID NO: 682 - DNA, 61 bp, Homo Sapiens
aatttccccacaacataatctttctaatttrgtcaggtcaaactttgcattgtcttgcaaa

SEQ ID NO: 683 - DNA, 61 bp, Homo Sapiens
gcaatcttcagaggtccacactgaaatgtgrcaacaggtaggggagacccagccattgccc

SEQ ID NO: 684 - DNA, 61 bp, Homo Sapiens
gaaagcctccatatacttggtgtcgaatgtrcaaatgagaattcagaccttcctgtgattt

SEQ ID NO: 685 - DNA, 61 bp, Homo Sapiens
tttattttgctcaaatttcatctctggagargtctttcccaaccaattacttcaaagaaag

SEQ ID NO: 686 - DNA, 61 bp, Homo Sapiens
aatataattgaaagggaagaatgctgaatgracttcgaactttcacctaattacattcctt

SEQ ID NO: 687 - DNA, 61 bp, Homo Sapiens
tgagttcaggaagtcagatggtcatagggaragagcaggagagtaattctcaagccaaaaa

SEQ ID NO: 688 - DNA, 61 bp, Homo Sapiens
aggaaagtactttgcaagaaaaaattgtttygggaactacattcttaagccaatggtgaag

SEQ ID NO: 689 - DNA, 61 bp, Homo Sapiens
cgtggaaaaaattccaagacgtgtatacttkccaaacaagaaaagaattaacattttcact

SEQ ID NO: 690 - DNA, 61 bp, Homo Sapiens
caatgtaagcaagagttgtggccaggcaaaygtccttggaaagccttaccctttagagata

SEQ ID NO: 691 - DNA, 61 bp, Homo Sapiens
gttgcctcttaagaaactccacggacttatkcttttccaatcctctcactataatcagata

SEQ ID NO: 692 - DNA, 61 bp, Homo Sapiens
cccatataaggttagtgatcatttaaggtgytgatgaatcagtaaaattaaccccaaattt

SEQ ID NO: 693 - DNA, 61 bp, Homo Sapiens
agtctatggagagagaatcttgttcttgttsatgtcaaagataactatcatgttcaagtgt

SEQ ID NO: 694 - DNA, 61 bp, Homo Sapiens
tggtcacgataggatcagaaaccaacagcartactttaaaaccaaagaaatgtttgtgtta

SEQ ID NO: 695 - DNA, 61 bp, Homo Sapiens
acacagaccttctttatctgccaaatctggrtatttattgcaatctatctgaaatgataaa

SEQ ID NO: 696 - DNA, 61 bp, Homo Sapiens
tacccttggatctgagtgacaactgtagaayatttggatcttgagtgtttgactgtctaac

SEQ ID NO: 697 - DNA, 61 bp, Homo Sapiens
ggtgacatgggggaagtgatgcaaaccaacrtgaaactcatgagtaacgaagtcctttgtc

SEQ ID NO: 698 - DNA, 61 bp, Homo Sapiens
atttttatcataggagatgacagctccatgmattattgccctaaagaccttccaatgcaac

SEQ ID NO: 699 - DNA, 61 bp, Homo Sapiens
aggaatgtagagatgagtaagatgtggcttsctatgagaaacttcgtggggtggtggagaa

SEQ ID NO: 700 - DNA, 61 bp, Homo Sapiens
gtgagaagtgggcatgtcaggccaaaaaacyatgtggaaaagcacaggaatatgaaagcaa

SEQ ID NO: 701 - DNA, 61 bp, Homo Sapiens
ggtttctcatctattagatggagcttataayagtacctcccttacagaattgttgtaagat

SEQ ID NO: 702 - DNA, 61 bp, Homo Sapiens
ataggaagtggcagctgcagtgagatttctktgatgtccaagggtggtgacagcagcttca

SEQ ID NO: 703 - DNA, 61 bp, Homo Sapiens
agctcattttaataaagatgttaaaacagtygtgcaagaaaatgtgttctgatgcatttgt

SEQ ID NO: 704 - DNA, 61 bp, Homo Sapiens
ccaataaataagtatcctatcagtattcacyaacgtttaaacttaattccatattatcaat

SEQ ID NO: 705 - DNA, 61 bp, Homo Sapiens
tgctttcttaggtttattctcttcccaattwtctgagtacagctctcacactaaaagccag

SEQ ID NO: 706 - DNA, 61 bp, Homo Sapiens
accatcatgatcaagtgtaatttatggctcygctagcttagtgagaatgaagcttaggtgc

SEQ ID NO: 707 - DNA, 61 bp, Homo Sapiens
acggtgattgtatgaagtttgaatgctgcamgttatgaaatatttggcccgctggattccc

SEQ ID NO: 708 - DNA, 61 bp, Homo Sapiens
atgtgcactttatcctcattccataaatgtyggtgcataccttatgtaagggagcagttca

SEQ ID NO: 709 - DNA, 61 bp, Homo Sapiens
caaggttacttaattcaacttaactatcatsttattcagcaccaagcatgtcccaggcact

SEQ ID NO: 710 - DNA, 61 bp, Homo Sapiens
ttcagtttgtgccattggcatctaactcatstcaccctaatcccagctctacctattagaa

SEQ ID NO: 711 - DNA, 61 bp, Homo Sapiens
ctatctagatagcgtatacaagatttgaaargaaattgtggaaattttaaagagctaggta

SEQ ID NO: 712 - DNA, 61 bp, Homo Sapiens
gccaaattttttttcaatgtactaccttctrtgaggcaatatgtaagtacagtgggtatca

SEQ ID NO: 713 - DNA, 61 bp, Homo Sapiens
gctgacctaagtgactttggaaatgggtagsattgataagactaaatgcaaaataagtggt

SEQ ID NO: 714 - DNA, 61 bp, Homo Sapiens
ctatatattagctcttgggccttggataaayggcttaaatatctcttagaccttgatttcc

SEQ ID NO: 715 - DNA, 61 bp, Homo Sapiens
tgcacttagtcctcatgccacaattactgtyctcccccatgtcaatgaaaatgaagcagta

SEQ ID NO: 716 - DNA, 61 bp, Homo Sapiens
cacacacacatgcacacacacacaggagtaygaggcagagaattaaatgcattgcagggtc

SEQ ID NO: 717 - DNA, 61 bp, Homo Sapiens
tgtcatatttaagaaagatgatgaaactaamttgcctctacccaaaagtaaccataaggtt

SEQ ID NO: 718 - DNA, 61 bp, Homo Sapiens
gatgccccatctagaactctctctagcatarcaacctagcacccaaggctggtaccactcc

SEQ ID NO: 719 - DNA, 61 bp, Homo Sapiens
tgtggtcagaggcctaagaatagaatacaaraactctccaaggaagcatgcttcttcccag

SEQ ID NO: 720 - DNA, 61 bp, Homo Sapiens
gaagcatgcttcttcccaggtttctcattasgagtttacaccaggagacaagcagcccttc

SEQ ID NO: 721 - DNA, 61 bp, Homo Sapiens
caagagctttttctcctaacatagatctttyccggtagtatgtgagtatgcttgattgttt

SEQ ID NO: 722 - DNA, 61 bp, Homo Sapiens
gtttttggcatcacgctgttaagtttgaacrtaatgataacaatttattttccttaggaga

SEQ ID NO: 723 - DNA, 61 bp, Homo Sapiens
ggagtgcatgatcttggcacactgtacactygacttcccaagctcaggagatcctcccacc

SEQ ID NO: 724 - DNA, 61 bp, Homo Sapiens
tttctctgaggtaaataagtagaaatgcgtytgctggctcatgtggtaagtgtaggtttaa

SEQ ID NO: 725 - DNA, 61 bp, Homo Sapiens
aagggcagcagtcgttccatctttcctgatyatagcaagaaatgcagtgtctgcctgttac

SEQ ID NO: 726 - DNA, 61 bp, Homo Sapiens
tcccagtgatgatcagcacgcagggtttatygtatcgtgaacatctaaatgttatttacac

SEQ ID NO: 727 - DNA, 61 bp, Homo Sapiens
taccacttaccagcaaattaacacaatacaygcaacttcgaaataaaacccagactgtgaa

SEQ ID NO: 728 - DNA, 61 bp, Homo Sapiens
cataagcaatattttttacagcaaaaatctsaggaaaaaacctagaggcccaaatttaaat

SEQ ID NO: 729 - DNA, 61 bp, Homo Sapiens
ctgcttcttaatggatggtagacagtgaaaytcatatctataaaaataaccctctgcagtc

SEQ ID NO: 730 - DNA, 61 bp, Homo Sapiens
aagtctggctcaatttcatccgctcgcacargttacctcttagaagccacattaaaatccc

SEQ ID NO: 731 - DNA, 61 bp, Homo Sapiens
gatgcataagtctaactttgtcttggtcatygaatgtttgagttaaaaagtgaacttagag

SEQ ID NO: 732 - DNA, 61 bp, Homo Sapiens
aggacagtggacgctgacttgggaacttcaytgtatagtcttcgctagatctgctgcccaa

SEQ ID NO: 733 - DNA, 61 bp, Homo Sapiens
ctcctctttacattgttgcaaagtagttaasagtcattgaaaggcagggttaatcttataa

SEQ ID NO: 734 - DNA, 61 bp, Homo Sapiens
tttggaatatttacagacttttcttcattgwcttctggtataaaatggtactgtttaaaat

SEQ ID NO: 735 - DNA, 61 bp, Homo Sapiens
acttcctaaaggctagtttcttgttcttttsttttcatgtcaaatataatacatgtgcttt

SEQ ID NO: 736 - DNA, 61 bp, Homo Sapiens
ttgaccagggtcttataagcaagaacaaaamccctcacatttagaaataaattttaagagt

SEQ ID NO: 737 - DNA, 61 bp, Homo Sapiens
acataaattatattaaagggtcaggaaaatkttgtttgaggtatgtgaggatgatttagtt

SEQ ID NO: 738 - DNA, 61 bp, Homo Sapiens
caataccaataatttgttccaattagaccayagtaaggttgttaaaaaataagcaaaacta

SEQ ID NO: 739 - DNA, 61 bp, Homo Sapiens
caatttctttgatttgataaaaggtgatcaytgagcctaagacctgatgtgctcacatcac

SEQ ID NO: 740 - DNA, 61 bp, Homo Sapiens
gaaatgcttgtcgactcctccgtcacttggrtagctctagtttatcgtgccggtttcaaaa

SEQ ID NO: 741 - DNA, 61 bp, Homo Sapiens
ttcaactcttcagaggggagaaaaactccaygaggtattgcatttcaagtcctgaatacaa

SEQ ID NO: 742 - DNA, 61 bp, Homo Sapiens
tctgaatgttttagattaaaagccttttcarttggatactttgcatgtatttgttataaat

SEQ ID NO: 743 - DNA, 61 bp, Homo Sapiens
tttgagaaagttcttcatagtagtgagacarcaagaaactggcataattgacgtgaaagta

SEQ ID NO: 744 - DNA, 61 bp, Homo Sapiens
cacgtcttttcctctctatggataatggagwacacgctcagctcttcagtttttgaaaggc

SEQ ID NO: 745 - DNA, 61 bp, Homo Sapiens
tatgttacgttaaaaatccaatcagtcttcygaacattgtgtattcacgatgctgtgccac

SEQ ID NO: 746 - DNA, 61 bp, Homo Sapiens
tcagagtctacaaaattaggtttacaaaagkggctgagaataggggaccaacctgggtgtg

SEQ ID NO: 747 - DNA, 61 bp, Homo Sapiens
gggagatgattgttttatcagctttactgaratttctcatttgctccttaacactctatta

SEQ ID NO: 748 - DNA, 61 bp, Homo Sapiens
acgttcagaagaaaatatcatttgtattaasacctattgacaggcacaataaaaatttcta

SEQ ID NO: 749 - DNA, 61 bp, Homo Sapiens
ggactgaaatcttctaatggttcttcagttyggttttgttccttttgttcagcattcctac

SEQ ID NO: 750 - DNA, 61 bp, Homo Sapiens
cattctgtcctctacgcttctgagcattcakaccttttctcatccatttttgtattccact

SEQ ID NO: 751 - DNA, 61 bp, Homo Sapiens
cagagttgaggacaacttaccatcttccccmgagtagacaatggtcacagtactcagggat

SEQ ID NO: 752 - DNA, 61 bp, Homo Sapiens
cagtcatttttttttcccttggtaagaggtraagtctgctcctcaatcatcttacaccatg

SEQ ID NO: 753 - DNA, 61 bp, Homo Sapiens
tgtcatgtccaaaagaagttagttaggaacyatctcagagaataggcccttgattaaatag

SEQ ID NO: 754 - DNA, 61 bp, Homo Sapiens
ttaaggtgatggccttctaaagcagctttcrgaagttttatttgtcaatatcagacataaa

SEQ ID NO: 755 - DNA, 61 bp, Homo Sapiens
aactaatttaacacaaaagataatcattgargtaggtcctattatcattccctctatatag

SEQ ID NO: 756 - DNA, 61 bp, Homo Sapiens
aagtactctatctgctcttcgtaggagaaayaacactgagtccatgattcagaaaatctgg

SEQ ID NO: 757 - DNA, 61 bp, Homo Sapiens
aggagagcagaaataaactgtaccttaaaasaactagtgctcagaggcctttgtttaatca

SEQ ID NO: 758 - DNA, 61 bp, Homo Sapiens
accatgagatttgcttaaggaagactgaagsctagtgtgacagaaaatggagctcaggagg

SEQ ID NO: 759 - DNA, 61 bp, Homo Sapiens
tcaggaggacccagaataaattacattcctytggagggtcctgagaggggcaggccatggc

SEQ ID NO: 760 - DNA, 61 bp, Homo Sapiens
gccaggcatgacagggagcttcagaaggcckctgaaattgctgtattcctttaggaataac

SEQ ID NO: 761 - DNA, 61 bp, Homo Sapiens
gtatgaatgatcatgtagttcccacagttaytggtgctagaaatttctgattctactctgg

SEQ ID NO: 762 - DNA, 61 bp, Homo Sapiens
cagatggatggatggatgaatttgtgttctyatgattgagacattacgataaggggaaaga

SEQ ID NO: 763 - DNA, 61 bp, Homo Sapiens
caagaatcaatcaggctgttggggatataawtctggaatgaaaattagactgaatttgttc

SEQ ID NO: 764 - DNA, 61 bp, Homo Sapiens
tgggcttattttctgattggagagaaccgcrtacagctatgtaattattacaacgtataat

SEQ ID NO: 765 - DNA, 61 bp, Homo Sapiens
ttttttttctctgtaacccctaacaacgttyggactatttcagcctttaaccatttggccc

SEQ ID NO: 766 - DNA, 61 bp, Homo Sapiens
tgctaatcatattactatcgttggtcttgtrtcaatttttaaaacatcatagccattatta

SEQ ID NO: 767 - DNA, 61 bp, Homo Sapiens
aagtcataactgtgagtatgaatatatgccragtcctgtgaatcctcctagtaaaacatca

SEQ ID NO: 768 - DNA, 61 bp, Homo Sapiens
attcattaaggatggatcagatatccacagkgtggcagaaagaatgataaaagctggggaa

SEQ ID NO: 769 - DNA, 61 bp, Homo Sapiens
gtgtagtaaagaatgcaggaagcaacggctsttaggtacacacatgatgagttaactggtc

SEQ ID NO: 770 - DNA, 61 bp, Homo Sapiens
tttttcaaatctggcctctagggtggtctcytcatcaagcagctattctccaaactttgga

SEQ ID NO: 771 - DNA, 61 bp, Homo Sapiens
tagaaggataattgagtaaatcgagtacccrattacggctgttggagttgatatgaccttc

SEQ ID NO: 772 - DNA, 61 bp, Homo Sapiens
gccggccaaagatgcctgaacaccaacagtyagggattctgatgaaggagattctagctaa

SEQ ID NO: 773 - DNA, 61 bp, Homo Sapiens
cttaccagtcatgagaccgggcaattgcttmacatctccacatctcaagttctcatctttg

SEQ ID NO: 774 - DNA, 61 bp, Homo Sapiens
aactttcaggctccttcaattctcagctacktccaagaaacggactgtccactggacctct

SEQ ID NO: 775 - DNA, 61 bp, Homo Sapiens
gctgagactcaggttagcaggggcaagggarctagaagaatcaagagatatagtaaagctt

SEQ ID NO: 776 - DNA, 61 bp, Homo Sapiens
ctaatacttccaattccattccaacaccatrggatttattctagccttcaccttttccatt

SEQ ID NO: 777 - DNA, 61 bp, Homo Sapiens
acttgacccattccccaccccctattaatgytgtgcaaagaggtaagcttcctgcctgaag

SEQ ID NO: 778 - DNA, 61 bp, Homo Sapiens
tttgtggttgatgagattgcctagtgcagcraaagttgtaatataagaaattcactcgcaa

SEQ ID NO: 779 - DNA, 61 bp, Homo Sapiens
cttctataattaatccccatctagacatccytctcacttaatgctagcatctttccccgcc

SEQ ID NO: 780 - DNA, 61 bp, Homo Sapiens
acagtacaatgcaaatcaattgcaatgtaargttcaaactgtgcaaaagatgcaggatttc

SEQ ID NO: 781 - DNA, 61 bp, Homo Sapiens
agatccattccttacacctctgatgttgggyagagcaggacagaaacaatgtcattccctt

SEQ ID NO: 782 - DNA, 61 bp, Homo Sapiens
cccggggatactgaccggctcatgcataaaycagtaagacaggagttagatggggtgtgac

SEQ ID NO: 783 - DNA, 61 bp, Homo Sapiens
ctgtctctgatcttactgtgtccaaagatgkgatccattttttagggttttttttaaaaca

SEQ ID NO: 784 - DNA, 61 bp, Homo Sapiens
caaaggtatctcatagaactaacttcgttcrtcatggttctggaggtgttagccaatgcag

SEQ ID NO: 785 - DNA, 61 bp, Homo Sapiens
cttcccacagaaggacttactcctcagtgawattccaagcagcaccgcctcgctctgctcc

SEQ ID NO: 786 - DNA, 61 bp, Homo Sapiens
agcctcccgagtatcttgaattacaggcatsagccgctctgtccggccttgcttggtcttt

SEQ ID NO: 787 - DNA, 61 bp, Homo Sapiens
ccaggcagcccaagtggaagcattgtgagartcggtggtggtgtgagcgtgtatgccctgc

SEQ ID NO: 788 - DNA, 61 bp, Homo Sapiens
tcaaactttcagaaaagttgcaaggatggcrcaaagaatacgggcatgcccttcactctga

SEQ ID NO: 789 - DNA, 61 bp, Homo Sapiens
attcctgtgcctttcctgcaggtctctatayctcactacaatggtggaacatcttcatctg

SEQ ID NO: 790 - DNA, 61 bp, Homo Sapiens
tctcccaacaattcgttcttctgtagtctcmgttatggtttaggggaaatattttggaagg

SEQ ID NO: 791 - DNA, 61 bp, Homo Sapiens
ttcaaatgtcaattttctttctgtgtaattrtaagcagaggtcagagcactagaggaggag

SEQ ID NO: 792 - DNA, 61 bp, Homo Sapiens
gtgggcagaatctgtgtgtcctaccatgtaygtaaaagaagacagccacggcgcaaagtga

SEQ ID NO: 793 - DNA, 61 bp, Homo Sapiens
atgatctgtaccaaagaatggggggatctastgaagctggggcccctgagaaaggtttact

SEQ ID NO: 794 - DNA, 61 bp, Homo Sapiens
gacttttggaaagactttcagagaagtacasctcccaaatcctttgacaaactgacaggcg

SEQ ID NO: 795 - DNA, 61 bp, Homo Sapiens
agtaaggaacggaactggggtccaggagacsgagagtcaccgagccactaagcattttctg

SEQ ID NO: 796 - DNA, 61 bp, Homo Sapiens
ccacgtgtctgcaggcaactgtaggtcctcygggtagctcttctggggtttggccggctat

SEQ ID NO: 797 - DNA, 61 bp, Homo Sapiens
gagggcctactgttcaactcaaattgaattyctgttagtattctctgcttctgaagcttct

SEQ ID NO: 798 - DNA, 61 bp, Homo Sapiens
caacacccagtcctattccaaactctcaacrattctatcttgttcctgtttttctatgtat

SEQ ID NO: 799 - DNA, 61 bp, Homo Sapiens
gaacatatcctgaagagcctagcatgatgasctacttcctactaccaaagaaggtacacaa

SEQ ID NO: 800 - DNA, 61 bp, Homo Sapiens
ttctgggtaatggttggtatatacgtaaccrtagatatacgcatatacagacacacatatg

SEQ ID NO: 801 - DNA, 61 bp, Homo Sapiens
tcacagatacagtcatatctatgtaaagagwctcaaagaactactatcatgaagcagtcag

SEQ ID NO: 802 - DNA, 61 bp, Homo Sapiens
aaaataaaaatacaatttgaattctgtgctstaagaattggataattttatttcactctat

SEQ ID NO: 803 - DNA, 61 bp, Homo Sapiens
tagctaaacaaagaagcaaaaccccaaatarcactatggtctgaatgtttgccctcctcac

SEQ ID NO: 804 - DNA, 61 bp, Homo Sapiens
ggccccccaaacctagagtgttttctctctkctcagtgcctttccacaggccctaggactt

SEQ ID NO: 805 - DNA, 61 bp, Homo Sapiens
attgtcctgtgaaaccctgttataacatttyagtggcaccaaaaaagggtgctgggacagg

SEQ ID NO: 806 - DNA, 61 bp, Homo Sapiens
tcctgcgagcggtccctcaccactgatgagyagaacgtggagagataaacccccccagctt

SEQ ID NO: 807 - DNA, 61 bp, Homo Sapiens
gagtgcatggatgttacctttccatgcttgycgctctctgcaaagtctagctggagatcaa

SEQ ID NO: 808 - DNA, 61 bp, Homo Sapiens
gctttttagccaggctgctaggaaatactcraaagattctagagaccctccctacctgccc

SEQ ID NO: 809 - DNA, 61 bp, Homo Sapiens
ggagcttaattccataagaaatttttgagtsccagtgtgaaacacacatcccacagttggc

SEQ ID NO: 810 - DNA, 61 bp, Homo Sapiens
cacagtggcaaagaggaagtcctcaggcaamgaaaggcagatattgcccaatatgcactaa

SEQ ID NO: 811 - DNA, 61 bp, Homo Sapiens
aataatatgctgcttttcatctctctgttaycactttgaatccactcagaaaaatctatgt

SEQ ID NO: 812 - DNA, 61 bp, Homo Sapiens
gtatatctctgggtctcagctatttgtgcarttttctaaatgaacaaggacattagatgca

SEQ ID NO: 813 - DNA, 61 bp, Homo Sapiens
tttatctttatattttatagatgaggaaatmacaatatagaatggttaagttactgcctga

SEQ ID NO: 814 - DNA, 61 bp, Homo Sapiens
tgcctgaggtcacaggggtgggtaagaagtkggcaaaaataggaattcaggtatttgggtt

SEQ ID NO: 815 - DNA, 61 bp, Homo Sapiens
acctggacctaattcatcaaaagaaggaaartagatttgaaggagtcataaatataacagt

SEQ ID NO: 816 - DNA, 61 bp, Homo Sapiens
aagacaggatgaactcacagatgtatcttaygctacacagctctccacaggatcagagtga

SEQ ID NO: 817 - DNA, 61 bp, Homo Sapiens
gtcccttctcctcataaccctcattctctaktatcactactaattccaggtaacatgatcg

SEQ ID NO: 818 - DNA, 61 bp, Homo Sapiens
tattgcagaagacagtatctcaagtccactyctgaataacccacacttgaatccaaccttt

SEQ ID NO: 819 - DNA, 61 bp, Homo Sapiens
gtgtgggagttatgtgtctctaagatttgtygacccattttgatggcaaggtgtattcaca

SEQ ID NO: 820 - DNA, 61 bp, Homo Sapiens
gctaaagtttgtgataaaacacaaatgctastaaaaggcaagggactggaagtgttcaaag

SEQ ID NO: 821 - DNA, 61 bp, Homo Sapiens
tcttttatgtttctcagttctttccatctcyccttggtgagcataaaaatcaattttttgt

SEQ ID NO: 822 - DNA, 61 bp, Homo Sapiens
gaagataacaaagcatttgattgactctgtrtggaaaagtagtaggtacaagaaggtgaag

SEQ ID NO: 823 - DNA, 61 bp, Homo Sapiens
attctacatgcactcacccatctgtttcggrgttctatgtttacattcaattccattgata

SEQ ID NO: 824 - DNA, 61 bp, Homo Sapiens
cttgtattttttatgcccatcatctccagtyggttccctgtgaaagattgcttattcttgc

SEQ ID NO: 825 - DNA, 61 bp, Homo Sapiens
gaatgatcagaggtcagatcacggaaaggayattagattttattgtaactacagagaaact

SEQ ID NO: 826 - DNA, 61 bp, Homo Sapiens
ccacagcctaggtctgcttgatccattgatygtaagagagactgttctgtcattgcattgc

SEQ ID NO: 827 - DNA, 61 bp, Homo Sapiens
gcttcatccaaacagcctcctttacttccayggtcccttaaaaccactttgctaggagtcg

SEQ ID NO: 828 - DNA, 61 bp, Homo Sapiens
taactactaagcagagtaatgaaacagaaaygaacacatgccaaaaagttaacaaaggcaa

SEQ ID NO: 829 - DNA, 61 bp, Homo Sapiens
aattcctgattattaacataattaacacctyttcattgtagaataggccggtagtcacctt

SEQ ID NO: 830 - DNA, 61 bp, Homo Sapiens
ttcacagaatctctaaagttgttttgagacraatttcttagcacttagtttcatccatctg

SEQ ID NO: 831 - DNA, 61 bp, Homo Sapiens
tgagagatggttgctgtggtgatgggaagarggctaaacacggagggcttgtcacaggggc

SEQ ID NO: 832 - DNA, 61 bp, Homo Sapiens
ggatttgagggcttggtcacatatagactcsgtgcttttgctgatgagcttcaaacttttc

SEQ ID NO: 833 - DNA, 61 bp, Homo Sapiens
ctgagcacatacactaagccccagtaaaacrcgagtaaatgtaagacttctttgagtacga

SEQ ID NO: 834 - DNA, 61 bp, Homo Sapiens
catactaacttcccctcccaggacagtcacyttttgatttgcccagcagagcagctgagat

SEQ ID NO: 835 - DNA, 61 bp, Homo Sapiens
ctccatttccaatttatgcatataacatttktatccattcttcaaagaaagtctcagagtt

SEQ ID NO: 836 - DNA, 61 bp, Homo Sapiens
gttttccaactcttgccaccctctctttctytccaatctagtagtccccagtgtctatttt

SEQ ID NO: 837 - DNA, 61 bp, Homo Sapiens
attttcttgcctatattcctaaatgaaagtyttcttcaattgttctgtgctgttttaaagt

SEQ ID NO: 838 - DNA, 61 bp, Homo Sapiens
acaaacatacacagcagcttgaagttcaaamacagtcagaagtagctaccaagaaatagga

SEQ ID NO: 839 - DNA, 61 bp, Homo Sapiens
ccagccttgtggggaatcttctgattttgawcttggtagatgcatactgccgtatttaata

SEQ ID NO: 840 - DNA, 61 bp, Homo Sapiens
catggaataaagttaagagtttaacgtgttygcagttaatccagaggccaaggagaacggt

SEQ ID NO: 841 - DNA, 61 bp, Homo Sapiens
aagggctaagtaagatcaaaggtaaagcacyaatagaatctagctcattgtcagcactggt

SEQ ID NO: 842 - DNA, 61 bp, Homo Sapiens
ggtcctactatcaggaggatgaggtaacaarcttccccataccacctcagaaaggataaac

SEQ ID NO: 843 - DNA, 61 bp, Homo Sapiens
ataaccaaggtgtgaagtgggaagggtagasgaagatagaaactaccaaaagttactaatg

SEQ ID NO: 844 - DNA, 61 bp, Homo Sapiens
acatggactacatcttctaaatcattatacmcagaaacgctctcagtagctgacaccaatc

SEQ ID NO: 845 - DNA, 61 bp, Homo Sapiens
aagatcccattaacaatagcaacgaaaagaygagatcactgagaacacatttaacaagaac

SEQ ID NO: 846 - DNA, 61 bp, Homo Sapiens
agtagccacaaaataaatcctactcccacarcttataacacggtacattccaggtggccca

SEQ ID NO: 847 - DNA, 61 bp, Homo Sapiens
gaatagtctgtagctgagttgttagtatcastgtaaatgtcttagttttgatagatacaac

SEQ ID NO: 848 - DNA, 61 bp, Homo Sapiens
aagttctatctagttctctacagcaattccwtctcattattcccaaggcccatttcttaat

SEQ ID NO: 849 - DNA, 61 bp, Homo Sapiens
gaaaacacagaagtgaccaatagtaagtgayagtgaggtatgttactgtatttcttcttga

SEQ ID NO: 850 - DNA, 61 bp, Homo Sapiens
tctcaaaagaatgtggcgccattccatttayatagagttcagcattaagaactgatcaatt

SEQ ID NO: 851 - DNA, 61 bp, Homo Sapiens
ccaagggttggtaaaaggcactgttttaatytgctgttcctgaagttttccctaattaatt

SEQ ID NO: 852 - DNA, 61 bp, Homo Sapiens
caagtgaaggtcggtgaaagctgcaggttcyaaattacagaatcaagaacagtatttcttg

SEQ ID NO: 853 - DNA, 61 bp, Homo Sapiens
ttgtagccattctttgtactgataagtgcaraaggcctgaaataaccaactgggtaagtca

SEQ ID NO: 854 - DNA, 61 bp, Homo Sapiens
aaaattctactaacacttgctggctcactcycttgctcccactctatactctggggtattc

SEQ ID NO: 855 - DNA, 61 bp, Homo Sapiens
tatctccatttttatagactggcccctttcraggagaacctattccaagcttgtcttggag

SEQ ID NO: 856 - DNA, 61 bp, Homo Sapiens
gaagagcagtgaggatgatgtctacctgcayacagtcattccggccgtggtggtcgcagcc

SEQ ID NO: 857 - DNA, 61 bp, Homo Sapiens
aattatgatctattggactggttagcaaagscaacatatgcggataagcttagggagtatc

SEQ ID NO: 858 - DNA, 61 bp, Homo Sapiens
tccagatgtggtacaaaaataggcctctgaygctgtcacatttgaggcctgtgctctccag

SEQ ID NO: 859 - DNA, 61 bp, Homo Sapiens
aaaaagaaattcatattggatacactatacyaaaactgcagaaagccaaaatcagagaaaa

SEQ ID NO: 860 - DNA, 61 bp, Homo Sapiens
cgggggggcagggaggcccagatgcctttgyacgtaccttcctcctgcttggcacacccac

SEQ ID NO: 861 - DNA, 61 bp, Homo Sapiens
tttcccagcatctcttgcaggtcactgtatyaaagcctctgacaagtcctgaagtccaaag

SEQ ID NO: 862 - DNA, 61 bp, Homo Sapiens
tcaggggttgtaggagatcagtgatgtcatstatgtaaaccacctgccccagagcagccag

SEQ ID NO: 863 - DNA, 61 bp, Homo Sapiens
agcatgaagtagtacctagttaagcaaatayaaggagcatctgctcaggagggaggatgca

SEQ ID NO: 864 - DNA, 61 bp, Homo Sapiens
tatattgtaattgcattcctggaaaatatgktgtttattaaagccatgcaaaaactcctct

SEQ ID NO: 865 - DNA, 61 bp, Homo Sapiens
gcatttccacaagattactttggattagctwtctcggtgcatctattctcatgacacttat

SEQ ID NO: 866 - DNA, 61 bp, Homo Sapiens
ctttggaagtttgaacagctcagtgttgtcratttgattttgtgatacatttcttactttt

SEQ ID NO: 867 - DNA, 61 bp, Homo Sapiens
tgataggaggtagtcttgcagctttaggaarcacctggatgatgacaggagggaacgtgaa

SEQ ID NO: 868 - DNA, 61 bp, Homo Sapiens
gccgtagaatcaggggttatcatcatgcttsaagtattatgctctagaacccaagtaccct

SEQ ID NO: 869 - DNA, 61 bp, Homo Sapiens
cctgaccatccgcagagggaattttatgttyagaacaggaagactgacctgactagcgcag

SEQ ID NO: 870 - DNA, 61 bp, Homo Sapiens
ttgaataaagatgaatgttgagctgaaaagrcttctccgatgctagggagaccatgagctt

SEQ ID NO: 871 - DNA, 61 bp, Homo Sapiens
caacgaaaaaggctgatttgttcactcaccwatttaaacatgtttctataaaaatgaagta

SEQ ID NO: 872 - DNA, 61 bp, Homo Sapiens
catgccttcgtttcctaaccatttgactggmcatagaatacctggctgaaaatcattttga

SEQ ID NO: 873 - DNA, 61 bp, Homo Sapiens
cacaagagttctttgccacgcttattcgccyagctctttccaaacagcaggaaaacgagta

SEQ ID NO: 874 - DNA, 61 bp, Homo Sapiens
cccaataaagttcctgcagttgagaatccaycctttctcagaatcactttctgaggatcac

SEQ ID NO: 875 - DNA, 61 bp, Homo Sapiens
gtgtaaaacacaaacagtgaggcaataatgrtaaagaagagataggataacgcatgagctg

SEQ ID NO: 876 - DNA, 61 bp, Homo Sapiens
tctttgtggcataaagtacatgcttaaagtrtatcgtgatgatcctcagctgcagggagct

SEQ ID NO: 877 - DNA, 61 bp, Homo Sapiens
tagcctcatctccagtatcctgctggttcabtctaattggtcattcctaatgcattagatt

SEQ ID NO: 878 - DNA, 61 bp, Homo Sapiens
attacttggtgactcttgtaagcaatgattraagatattcactaagattcgagttcattat

SEQ ID NO: 879 - DNA, 61 bp, Homo Sapiens
tctgattgcaactggattatactaggcattygggatgaagaggatgggctgggagggagct

SEQ ID NO: 880 - DNA, 61 bp, Homo Sapiens
gtaaaatatgacatactctgcctctctttcstttgttcattttgttggattttagcacaat

SEQ ID NO: 881 - DNA, 61 bp, Homo Sapiens
acagtaatggcagatctgagataagagtccyggaccaccatatgaatccagattcttttga

SEQ ID NO: 882 - DNA, 61 bp, Homo Sapiens
tgaaactctcttggcaccattcacttcggcytcaatggcaccagaacagaaatgataacta

SEQ ID NO: 883 - DNA, 61 bp, Homo Sapiens
tgaggatgaccaaaagccaactcttgacccrtgtacacctgcctaaaccaaactcctatca

SEQ ID NO: 884 - DNA, 61 bp, Homo Sapiens
gcttaaaaaattgctgcttaagatatacacrtccttctgcaaagaaacaacttagcaaacc

SEQ ID NO: 885 - DNA, 61 bp, Homo Sapiens
ggaaactacgtgaacttagacaaacctaacytgggcctgtctagctccagtgaagagcaaa

SEQ ID NO: 886 - DNA, 61 bp, Homo Sapiens
ccaacatttttcagaaaacatttattttcakttatttactatgcactctgtgtttcattat

SEQ ID NO: 887 - DNA, 61 bp, Homo Sapiens
aatttggtatcagtcttttgctgaggtattmtaataggtacacgagcaccttttaaaaagc

SEQ ID NO: 888 - DNA, 61 bp, Homo Sapiens
atgttagcgtccctcttgtttccagctatckcacatatctattacttttttggtctgccca

SEQ ID NO: 889 - DNA, 61 bp, Homo Sapiens
tacctaggatgtccatagcattatcgaacaraagtgatggtaactggcattcttgtcttat

SEQ ID NO: 890 - DNA, 61 bp, Homo Sapiens
tttttttttcaagtatcacttgagaaaccayatccactcgaagaaaatcaactttttttcc

SEQ ID NO: 891 - DNA, 61 bp, Homo Sapiens
tgtcttccgaccaaccaaacaagtgactcamaagaagcaccaccatctgaacaggtatact

SEQ ID NO: 892 - DNA, 61 bp, Homo Sapiens
gaccagggagggctccatgcagaagaccgamatttggttaatcctcaaagttcctacttat

SEQ ID NO: 893 - DNA, 61 bp, Homo Sapiens
tgccacattaaccactcattcaacatatacmaagtgccaggatacagtgactgttctgagg

SEQ ID NO: 894 - DNA, 61 bp, Homo Sapiens
cctaaggtgacacttaaggggctaactcagktgacagaaatgtattttaacatgtgtgtac

SEQ ID NO: 895 - DNA, 61 bp, Homo Sapiens
tcacctgtgcttttggtgtcctacctaagayatcacttccaaatctaatgtcataaatttt

SEQ ID NO: 896 - DNA, 61 bp, Homo Sapiens
ttaaagcggagtaacaacaacaacagattgrtggttatttggtttgggggagaaatttccc

SEQ ID NO: 897 - DNA, 61 bp, Homo Sapiens
aggacagtgctttctcactgatttatctctsatttctctcttcctctgcagattaccaaac

SEQ ID NO: 898 - DNA, 61 bp, Homo Sapiens
tatccaccttttttatagaagataaactacrtctctcagtttcaggaagagactaaaaaaa

SEQ ID NO: 899 - DNA, 61 bp, Homo Sapiens
tacgctcaattgacaaatgttttctgaatgytttctatacactaagcactgagctaggcaa

SEQ ID NO: 900 - DNA, 61 bp, Homo Sapiens
cccccacctatcacctgcttcaagactgagrcactcgatcccctggcttctgctagcactg

SEQ ID NO: 901 - DNA, 61 bp, Homo Sapiens
gcactggcgactgactgctcagctgatcctygtctgggaattcactttggctgaagagagc

SEQ ID NO: 902 - DNA, 61 bp, Homo Sapiens
tccatgcttttaggtagaggcctagagttayctgagggtttatagaacgtattttgcactt

SEQ ID NO: 903 - DNA, 61 bp, Homo Sapiens
tgtaagtaatagtgttcttatctatcaagtytcaaagtatcgccactatgatggtgttagg

SEQ ID NO: 904 - DNA, 61 bp, Homo Sapiens
ctgcagatccctggcccatctggaacccagwttcacacagattcaccttgtgtgaatttca

SEQ ID NO: 905 - DNA, 61 bp, Homo Sapiens
ctaccttcagtgggaattcctcatggccacyatatttggaattaaggagtcaaggctcccc

SEQ ID NO: 906 - DNA, 61 bp, Homo Sapiens
atcatctacaaacctgtgactttccattccygggcttgatgccgggaaaacaccttggccc

SEQ ID NO: 907 - DNA, 61 bp, Homo Sapiens
gattgaggcctcaggctctttgtcttggcarcctttcgagttctgtttgagatgacatcca

SEQ ID NO: 908 - DNA, 61 bp, Homo Sapiens
aacctgaagcaaaggcagatagtaagtctcyttctgtgtaatgccccaactaaacccttat

SEQ ID NO: 909 - DNA, 61 bp, Homo Sapiens
ttaacagttctcgtgtgcaggttataaacgyggcttcttatctccagacttgctcttcctg

SEQ ID NO: 910 - DNA, 61 bp, Homo Sapiens
cgtgtatctttgttggaatggacattaggtytccaagtccaggcctgtgatttagaagggt

SEQ ID NO: 911 - DNA, 61 bp, Homo Sapiens
ctgtcctcaggcttggtggagccagtgaacrtggtggacaatggagatggcacacacacag

SEQ ID NO: 912 - DNA, 61 bp, Homo Sapiens
ggctctgtctttcctcatctacattttgagcytggcttggtgcctggcacagggtcagaag

SEQ ID NO: 913 - DNA, 61 bp, Homo Sapiens
ccatcctggcaacccaatcattgaggtgccrgttcccatgccaggggggctgggactgcag

SEQ ID NO: 914 - DNA, 61 bp, Homo Sapiens
ccttgccaatgggtgagcaggagctgaattygagctgcaatgctttggttaagcaatgagc

SEQ ID NO: 915 - DNA, 61 bp, Homo Sapiens
tggagggcttgtcctacttcctacttacttracctctgcttctgctgaagcccttggctca

SEQ ID NO: 916 - DNA, 61 bp, Homo Sapiens
aagaaccaactcggcacgttccatttcattygactcacttgcttagatagcttaggaaacc

SEQ ID NO: 917 - DNA, 61 bp, Homo Sapiens
actcgtgatcatctgtgcatacaccagaggmtaaaaatgttcggacagagagggccagtat

SEQ ID NO: 918 - DNA, 61 bp, Homo Sapiens
ctaacaaggaggagaatatagcccgttgcamgcactacaatcaagtaggtggtacacatcc

SEQ ID NO: 919 - DNA, 61 bp, Homo Sapiens
tcttaatatggactttcatttgaaagttgtygtcagattttgtggagaagccaaattctag

SEQ ID NO: 920 - DNA, 61 bp, Homo Sapiens
tcctactatacctttcacatattctttgacrttttattccctccatcaaatatgagttgtc

SEQ ID NO: 921 - DNA, 61 bp, Homo Sapiens
tatttggatggtgatctcagaaaatttgaawgaaagagatgagacagtaaacactggaagg

SEQ ID NO: 922 - DNA, 61 bp, Homo Sapiens
aaatttgaaagaaagagatgagacagtaaamactggaaggaaaaaggaaacagcatgtgtt

SEQ ID NO: 923 - DNA, 61 bp, Homo Sapiens
tagaaggctgtggcaacccaccaattggttragcattgcctgtagtgctgttacttccccg

SEQ ID NO: 924 - DNA, 61 bp, Homo Sapiens
gcgggggggacctcatgattccatctttatrgcccaactgttgattaacttccaaatgaaa

SEQ ID NO: 925 - DNA, 61 bp, Homo Sapiens
attcagcagcatattcaaagagacagagaakaactgacatgatgctgatgaagcttaaact

SEQ ID NO: 926 - DNA, 61 bp, Homo Sapiens
gactattaactagtaattgatgacaaccaargaaggtagttttcctaatacctacaaaact

SEQ ID NO: 927 - DNA, 61 bp, Homo Sapiens
  misc_feature (31)..(31): n is a, c, g, or t
ttcctggctgcagactcttgccattacatcnggaaaaacaaagagcagttttctctcagac

SEQ ID NO: 928 - DNA, 61 bp, Homo Sapiens
cccagaagcagatctggagacaggtattcamgagcaagtattttatttaggaggttatcgc

SEQ ID NO: 929 - DNA, 61 bp, Homo Sapiens
catagaattactggatcaaagggcgtaaacyttttcagtattatttctaaatttcttactt

SEQ ID NO: 930 - DNA, 61 bp, Homo Sapiens
ttcactttgttgattgttgatttgcggtgcrgaagctttttaacttgatgtgattccattt

SEQ ID NO: 931 - DNA, 61 bp, Homo Sapiens
ccattggtgatgggtcatttaaccatattgrtgtaccttaatgcagtagatgtgttccaga

SEQ ID NO: 932 - DNA, 61 bp, Homo Sapiens
aaatggaccccggcaggaagtcataacaagraagggtcacagtctgataaaaaagtcagtc

SEQ ID NO: 933 - DNA, 61 bp, Homo Sapiens
gccatcaccacatgatagcatttgtcttggrataaaccactcatgtaaaatgttatcaaag

SEQ ID NO: 934 - DNA, 61 bp, Homo Sapiens
aaaacaaatccttatactcattcatactccyggaaatgacttccgtgggaatttaggagaa

SEQ ID NO: 935 - DNA, 61 bp, Homo Sapiens
gatttcagttcaaactatgctcagtaagttytctaagcaactccccaagtttaggtcaggg

SEQ ID NO: 936 - DNA, 61 bp, Homo Sapiens
aaagcccctgacttcaagccttcttttctargtaatagctggaagtcttgggaagtcctgt

SEQ ID NO: 937 - DNA, 61 bp, Homo Sapiens
agaaataacatcagtccttttcttgtgatarcgttggatgacaccattaccttggctacct

SEQ ID NO: 938 - DNA, 61 bp, Homo Sapiens
cagcctcttccttggcccccacaaacataaygcagaaggcttccaaaagaccagtgctagc

SEQ ID NO: 939 - DNA, 61 bp, Homo Sapiens
tcatttagatgctgataatatcatctgatcygggagtggcttttctctatcagaactgcca

SEQ ID NO: 940 - DNA, 61 bp, Homo Sapiens
caatctagtgtaaagtttacatttccagttrtcatcccaatctgccactgaagtacttcct

SEQ ID NO: 941 - DNA, 61 bp, Homo Sapiens
ttgcccatcttgccaaagtagtccaaacacrcttcaatgaggacagttatatttagcaggt

SEQ ID NO: 942 - DNA, 59 bp, Homo Sapiens
attataaattatcaggactgttgagttayattcagtttttgtttttgtttttcaatggc

SEQ ID NO: 943 - DNA, 61 bp, Homo Sapiens
gtacaaactgaaaatcagtggtggtacctgytaggcttttagacatagggtaagtcttgtg

SEQ ID NO: 944 - DNA, 61 bp, Homo Sapiens
atctttactgactctcctgatacgcagactwtggagaaaaagaatcttctatcaaatctag

SEQ ID NO: 945 - DNA, 61 bp, Homo Sapiens
ggctccccagcaagcagttgcacaggggacraagtctttgtggcatagccggtaatgagct

SEQ ID NO: 946 - DNA, 61 bp, Homo Sapiens
tccaatggcaggggtgaggtgggattggagrataggaacatggctctggatttagaatacc

SEQ ID NO: 947 - DNA, 61 bp, Homo Sapiens
agggtcttggaagaaatcgggcaggacatasgccaagtacttataaccatacgtattgtta

SEQ ID NO: 948 - DNA, 61 bp, Homo Sapiens
ggcatatcaacatcttagggacctgatgacyaatggtttaaaagcatgccagcttttcacc

SEQ ID NO: 949 - DNA, 61 bp, Homo Sapiens
gaagaaaactctttagtctaaaacaaacaamagaagtccactaggtcagattctcactgta

SEQ ID NO: 950 - DNA, 61 bp, Homo Sapiens
gagggctggaggggggagagcgcggagcgtyctcagagcctcagtacttctgaccccaata

SEQ ID NO: 951 - DNA, 61 bp, Homo Sapiens
atgtcttgggggttacctgatcactgaggargagtacttggagttggtatgtgaaacatca

SEQ ID NO: 952 - DNA, 61 bp, Homo Sapiens
gtgttggcttcagttcttccaggcatgttaytttactggtcaatgtgagagaaagagagca

SEQ ID NO: 953 - DNA, 61 bp, Homo Sapiens
ccttggacggctgcagccacctccttactgrccttcttgacttcaccccttaagtgaattt

SEQ ID NO: 954 - DNA, 61 bp, Homo Sapiens
attaaggacacaccataccctgtcccagatsctagaaacacaaaaaccactaggacagagt

SEQ ID NO: 955 - DNA, 61 bp, Homo Sapiens
ccaatttttggtgcattttcacaagttttarttcctgggctcgagtttctaaaggaagttc

SEQ ID NO: 956 - DNA, 61 bp, Homo Sapiens
aaagacccatctcacaggctatctgttccaygaagtatttcttcactacccatgtccttat

SEQ ID NO: 957 - DNA, 61 bp, Homo Sapiens
cctgggtaatccagatactctggttactaarctggttacactggactctttctacaatctc

SEQ ID NO: 958 - DNA, 61 bp, Homo Sapiens
taccagtcagacaatattgagaaccatagtrttaagaccaaactaaattcttcatcaggtg

SEQ ID NO: 959 - DNA, 61 bp, Homo Sapiens
cttgcacgctcatttaatatgaaatgatgcygaaaattcaggagagtcacaaagcttttgt

SEQ ID NO: 960 - DNA, 61 bp, Homo Sapiens
aattgctttgggctgctagtaatcatgaccygagaatagtggcctaggactggtttggcat

SEQ ID NO: 961 - DNA, 61 bp, Homo Sapiens
aggattacactctgtcctatgtatttgatgmatcaatgagcagtgtagtcacagttcattc

SEQ ID NO: 962 - DNA, 61 bp, Homo Sapiens
acaatgctttggaaagccaaaaactaggcartcacacttggtatctacccttcatccttcc

SEQ ID NO: 963 - DNA, 61 bp, Homo Sapiens
ctcagctccatggtgctcaatgatggtatcktggcatttgagatgggtccattctcctttg

SEQ ID NO: 964 - DNA, 61 bp, Homo Sapiens
tgggtgtttcactttgccttactggtccttmctcattccagttctgtaggaagagtagact

SEQ ID NO: 965 - DNA, 61 bp, Homo Sapiens
cttcttaaagaacattttacctgcatttttwaaaccattttctccattttccagggcttag

SEQ ID NO: 966 - DNA, 61 bp, Homo Sapiens
aaaatatattacagctgacaatgtaccatawctatagtgtagtaatttaattctgttactg

SEQ ID NO: 967 - DNA, 61 bp, Homo Sapiens
atagccaaaacctcagttaaccagaaccccycattccccagaatactcctttcatgtacca

SEQ ID NO: 968 - DNA, 61 bp, Homo Sapiens
tgatctttatagacttcatagccaaacatgmgctaaagtttaccccctacacccaccaggg

SEQ ID NO: 969 - DNA, 61 bp, Homo Sapiens
cggcagtctatgtctacatattcatggcacrctggagccctcccctgactgtgctcataca

SEQ ID NO: 970 - DNA, 61 bp, Homo Sapiens
acatagtctcaggccaaaaaacaagcaacayccgaaaatgaaagttgaagagagaagagaa

SEQ ID NO: 971 - DNA, 61 bp, Homo Sapiens
aataggaaaattttccagcttgctctggagrggggtacattgtttggcaatttcaattagc

SEQ ID NO: 972 - DNA, 61 bp, Homo Sapiens
gtgaaccttaagtcatccctctcacaatgamcacaaagacaacttattaaacatctttaaa

SEQ ID NO: 973 - DNA, 61 bp, Homo Sapiens
gaactttaagttagtacacactgttgatttkgtgtctgttacatacatatatactgatgtt

SEQ ID NO: 974 - DNA, 61 bp, Homo Sapiens
tacctagcatgcagaaagaaggaagcaatgytacaactctaatatttaaagaagcagcagt

SEQ ID NO: 975 - DNA, 61 bp, Homo Sapiens
caaatcaaaagcctaagaattcgttgctagmcatgaaagtcctctgttggaacatcctctt

SEQ ID NO: 976 - DNA, 61 bp, Homo Sapiens
actcagctcatcaatgcaccagactcggccraaaatttctcaacttgttgatacaaagcta

SEQ ID NO: 977 - DNA, 61 bp, Homo Sapiens
aagctgagcaacacactcaaaatctaatcgstgcctgagaaatcaggaattgactctaaac

SEQ ID NO: 978 - DNA, 61 bp, Homo Sapiens
atatatcttttatgagtttgagtatttccaragaataggtttctagtggtagaaaggctag

SEQ ID NO: 979 - DNA, 61 bp, Homo Sapiens
tgtgtagcaaacccaggtggagaggtaaaawcgtgatgaggtgggaaaggaagacggccaa

SEQ ID NO: 980 - DNA, 61 bp, Homo Sapiens
attcaataaagggatattttttgaacatacyttgtgtttcagatactctgctctgaaatca

SEQ ID NO: 981 - DNA, 61 bp, Homo Sapiens
agataggctagaaatagaattgccaggtcartatgtgtgaagcatgtttaaacattctaat

SEQ ID NO: 982 - DNA, 61 bp, Homo Sapiens
tgggtatagaaatcacctagaaaagtaacaragttgtcagtgaaaacttgcaaaaggggat

SEQ ID NO: 983 - DNA, 61 bp, Homo Sapiens
tccctcctccctccttctcaagaaatttgcratgaaataagcacttttaaacacaaggagc

SEQ ID NO: 984 - DNA, 61 bp, Homo Sapiens
ataggtttcttcctgttctgagattcctctsaaccctacctctgttgtttgtttagataca

SEQ ID NO: 985 - DNA, 61 bp, Homo Sapiens
tcctttgctgtgggtccctgtcctgggcacygtagaattcttagcagctttcctggtccct

SEQ ID NO: 986 - DNA, 61 bp, Homo Sapiens
tgaaacttgtcaactcgatattttctcacawttcagaacaagcagggaaacaacaacaaca

SEQ ID NO: 987 - DNA, 61 bp, Homo Sapiens
tgttccaggaccttccctccttcacagctaygttttagggatacgagtatttaatttataa

SEQ ID NO: 988 - DNA, 61 bp, Homo Sapiens
ttttgtacttcatctcccaatatgcagaccytgcttcaaagagccagatgacatgtaataa

SEQ ID NO: 989 - DNA, 61 bp, Homo Sapiens
tgtagttagagctgcaccaacaccactaccwacattagcattcatttttgggcaaaataat

SEQ ID NO: 990 - DNA, 61 bp, Homo Sapiens
gtgtgagcaagatgttatgaatctccaagcrtgaaagatattcccaaatcttaagagggag

SEQ ID NO: 991 - DNA, 61 bp, Homo Sapiens
ttgattccttttactacaatatttaatctaktctactcttgaccaaaacaggaaataaact

SEQ ID NO: 992 - DNA, 61 bp, Homo Sapiens
acactttgttgtcatttaaggttgaatatcsagagagtagcctgagtcatgctctgtcact

SEQ ID NO: 993 - DNA, 61 bp, Homo Sapiens
aatctaaaaatttatcataaggtatgatacsaacattgaaagtaaaattactaccacattt

SEQ ID NO: 994 - DNA, 61 bp, Homo Sapiens
gtcaatattaaaatttctagagtcttctggyaaagtgaaaacctgactgcctaacaaacgc

SEQ ID NO: 995 - DNA, 61 bp, Homo Sapiens
tttacattatgcaatgaatgctaattgacarctgattcataattagttaattgtaaacact

SEQ ID NO: 996 - DNA, 61 bp, Homo Sapiens
cactgttttgaatccagggctcctttgtgtktaatatccagaagaatccccattgtgtttt

SEQ ID NO: 997 - DNA, 61 bp, Homo Sapiens
ctacacttgactgttcccctctctgtgaatytacatgatatgtttgaaatactgcccctca

SEQ ID NO: 998 - DNA, 61 bp, Homo Sapiens
gaaactagagaggattgaggatatttttctygttaaaacccagaactggaggatcctaggg

SEQ ID NO: 999 - DNA, 61 bp, Homo Sapiens
aggtgggtaataggatctgggcatggcttcygcatggaaattagtttccctggttgcctgc

SEQ ID NO: 1000 - DNA, 61 bp, Homo Sapiens
ggtgctcaaagatactttatacacgtgagawcttacacagcctttaaaagcaaggacattc

SEQ ID NO: 1001 - DNA, 61 bp, Homo Sapiens
agtcttataaagcagactttttctgaacacrttgtgaaaactcattttaacacattagtgc

SEQ ID NO: 1002 - DNA, 61 bp, Homo Sapiens
tttaaggtgaggattttaccattgcattccktaaaaatttatatctaagttttggaaaagt

SEQ ID NO: 1003 - DNA, 61 bp, Homo Sapiens
attttctaaaacacttgcttatcaattcatytgtgccaacatttaaaatatactttttctt

SEQ ID NO: 1004 - DNA, 61 bp, Homo Sapiens
ttttttaatttctgcagatcctttcattatracgttccataatagttcatcaggagagtag

SEQ ID NO: 1005 - DNA, 61 bp, Homo Sapiens
cagccttatataaagagaaccaacattgacmttgcctgtgcttgctaatttaccatacttg

SEQ ID NO: 1006 - DNA, 61 bp, Homo Sapiens
  misc_feature (31)..(31): n is a, c, g, or t
atatcaagatacttagactctgatagtattnggaaaacacactatttctaggaagtattac

SEQ ID NO: 1007 - DNA, 61 bp, Homo Sapiens
ttaaggcagaggctaagccaatgtaacaaasagactccagaatacagatttattcctcttt

SEQ ID NO: 1008 - DNA, 61 bp, Homo Sapiens
aaatatttgcttaagtaatttgtcacttttyatttgatcatttttgtatccactcactcaa

SEQ ID NO: 1009 - DNA, 61 bp, Homo Sapiens
aagaactttatcgtcaattattgaggtcaamtgaactgtcagcactcttgtgggcagggat

SEQ ID NO: 1010 - DNA, 61 bp, Homo Sapiens
acatgtttctgaagctgaggagttggtttcyaacacgtgatctgacctgacctccactaga

SEQ ID NO: 1011 - DNA, 61 bp, Homo Sapiens
tttttttttacctgaggttattttacttctstttgctctccttctccacataaaaaggaaa

SEQ ID NO: 1012 - DNA, 61 bp, Homo Sapiens
atctctaaaggttcactggaaatttgcattrctcagtgaagaatcaaatcctagccagatg

SEQ ID NO: 1013 - DNA, 61 bp, Homo Sapiens
ctctctacttttttaatggaatttgtgaagycccttaataacaagttgatttataaagctt

SEQ ID NO: 1014 - DNA, 61 bp, Homo Sapiens
gatgcggcacagacagagacaacaagctatrttttgctaatgggtcctatcaatatggggc

SEQ ID NO: 1015 - DNA, 61 bp, Homo Sapiens
tgacaagttactctaacataatagcgaactrcaaactgcacagggctttggagcccaactg

SEQ ID NO: 1016 - DNA, 61 bp, Homo Sapiens
acttggattaaggtcaaaccatccttgcccyagtggcttgaggttgttcctctttgttttt

SEQ ID NO: 1017 - DNA, 61 bp, Homo Sapiens
tatcacttgctcttgcagtcagtccctcttygattaattcctactatattgattggatgat

SEQ ID NO: 1018 - DNA, 61 bp, Homo Sapiens
ggactaggggtaaggcagccttacaaacctktggtggtgcatactcacatctctgatgtgg

SEQ ID NO: 1019 - DNA, 61 bp, Homo Sapiens
ggggctagacaagggtatattctaaaaagasgaaagcgctactgtaataatcttgcctagg

SEQ ID NO: 1020 - DNA, 61 bp, Homo Sapiens
aggcacatttgaagacaagtggcctacagcratgctcagatttttgtgtgcattttcaatc

SEQ ID NO: 1021 - DNA, 61 bp, Homo Sapiens
caggagagaagcatctcctggggacaatttmcatcctggacggagaatgcaaaggcagaag

SEQ ID NO: 1022 - DNA, 61 bp, Homo Sapiens
gagcttatgggctggtttaaaaattacaacygacactctctgcatccccttctagaaacgc

SEQ ID NO: 1023 - DNA, 61 bp, Homo Sapiens
tgtggagaatggcttgaagaaaggaggcacraatgcatcaggaggggagtatgtggtaagc

SEQ ID NO: 1024 - DNA, 61 bp, Homo Sapiens
gagtcaactccagtcctgctttcaaagggcrgcccggaaagagaagactcatccaggaaat

SEQ ID NO: 1025 - DNA, 61 bp, Homo Sapiens
gatttagaaaactggaaagtggcaactaggytagaatagtggcaactaggttcggaggttt

SEQ ID NO: 1026 - DNA, 61 bp, Homo Sapiens
cacagacaaacccagaatactctaatactgragctgtagtgtgcaatccacctataattct

SEQ ID NO: 1027 - DNA, 61 bp, Homo Sapiens
aataaaaataaattagccaggaatggtgttkcgcccctgtagttccagctacttgggaagg

SEQ ID NO: 1028 - DNA, 61 bp, Homo Sapiens
cagaagtgtatatgactgttttttaaccaayccttcatatcattcattgatgagcacttag

SEQ ID NO: 1029 - DNA, 61 bp, Homo Sapiens
acaaatttataaatatatagtacattactgktgactctagatacaatgttgcacagcagat

SEQ ID NO: 1030 - DNA, 61 bp, Homo Sapiens
atgggagtgggtttctgatgaaaggattagmtcagcccccttccctctcttgcacatctct

SEQ ID NO: 1031 - DNA, 61 bp, Homo Sapiens
tgaaagtaggtaaaagccctgacttataacmcaaggtaagagagcagtcagttatttactt

SEQ ID NO: 1032 - DNA, 61 bp, Homo Sapiens
taaatgttatatttgttaaactatgtgaaaygcatccttctgggaaaagtgcgaatggagt

SEQ ID NO: 1033 - DNA, 61 bp, Homo Sapiens
ctccaagactggtgaaaatcacctataggcrataatctggcatacattgtcaaccttggag

SEQ ID NO: 1034 - DNA, 61 bp, Homo Sapiens
aaaataagtactgttgatccatgtaatcctktgcatagtctcatctttactatctttcttc

SEQ ID NO: 1035 - DNA, 61 bp, Homo Sapiens
tgaggagatgtgttactttttgttggaagaytttaaagacaacttttgacgatgttgattg

SEQ ID NO: 1036 - DNA, 61 bp, Homo Sapiens
gagggcagatattttatagaatgtcactcartttggttttgtttattgcctcatgattaga

SEQ ID NO: 1037 - DNA, 61 bp, Homo Sapiens
acttccttgaagagtcattttagcaaagacmcttcttctactcttacacactcctttgggc

SEQ ID NO: 1038 - DNA, 61 bp, Homo Sapiens
tgatcatgttccttctctgaatcttaccctwcagtgcctttaggacaaatccactgctcct

SEQ ID NO: 1039 - DNA, 61 bp, Homo Sapiens
tcttgcattcaaaggcctgaaccagagttartcacttgaactttctcaatatgccatgctc

SEQ ID NO: 1040 - DNA, 61 bp, Homo Sapiens
aatttcctcctataatatctagtgaggaaarggggtcatggagacaggtggttttcggggc

SEQ ID NO: 1041 - DNA, 61 bp, Homo Sapiens
gcattaaaattggatctggcttaaaggttaygagagaggaacttgacacttaaattatgga

SEQ ID NO: 1042 - DNA, 61 bp, Homo Sapiens
gaattaactgcagttaggaaatgatgacttytttgacagatacattggcaatatttctatt

SEQ ID NO: 1043 - DNA, 61 bp, Homo Sapiens
cagttgttcaataatgctggtagaacagtakttaaagaataaactgcaaccagaagaagct

SEQ ID NO: 1044 - DNA, 61 bp, Homo Sapiens
cagtaccacagaaccggtgtttgagtgctgrcaccatatgcaacatggggcatccgggctg

SEQ ID NO: 1045 - DNA, 61 bp, Homo Sapiens
cgggttgttgttaatttcatactggtatttsaggtgataatgttgttagactgtctggagg

SEQ ID NO: 1046 - DNA, 61 bp, Homo Sapiens
caggctttgaaagtttaaatgtgccacccamgtgcaaatgaggctgattcatggtatactg

SEQ ID NO: 1047 - DNA, 61 bp, Homo Sapiens
tcaaaacttcctaaaaattcccttgactctyttgaggactcagctccctgtgaagagatca

SEQ ID NO: 1048 - DNA, 61 bp, Homo Sapiens
gaaagcacgcctgagtttggcagggcttacyctaaggtgggcagacactgcttccccatta

SEQ ID NO: 1049 - DNA, 61 bp, Homo Sapiens
gtctatctattttgtctgtctgaaaagaatrcagcattaaaatcaggaagaacaccctttc

SEQ ID NO: 1050 - DNA, 61 bp, Homo Sapiens
ttagctccccagggtctccagtccttttcayagtcaaaccaccggttagtgatttcaagaa

SEQ ID NO: 1051 - DNA, 61 bp, Homo Sapiens
catctccactgggatacctgaaagtacctcygacgtgtccaaagccaaattcatcatcttg

SEQ ID NO: 1052 - DNA, 61 bp, Homo Sapiens
ggaattactttttgttctatttgccaggtcrttgcaaggatttattatatgcacaagcaca

SEQ ID NO: 1053 - DNA, 61 bp, Homo Sapiens
ctgggcctctctcctacataaggcatggggrcgaattgatccagaacaactggtgctatca

SEQ ID NO: 1054 - DNA, 61 bp, Homo Sapiens
taggactggtttaaattcttcctccatgggygcaggatgagttatgcccagtattgctttc

SEQ ID NO: 1055 - DNA, 61 bp, Homo Sapiens
ttctctcagctccaagtaattcagcacaagwatatcacttccttcttatcaatgtacctca

SEQ ID NO: 1056 - DNA, 61 bp, Homo Sapiens
ttcagtgagacttgacacctgaatgttagcrgttcataggtcagaagatgcttgaaggaat

SEQ ID NO: 1057 - DNA, 61 bp, Homo Sapiens
acattgtgagagagcacctacgtcctgggcragtataatagtaaaactgaacttacattgc

SEQ ID NO: 1058 - DNA, 61 bp, Homo Sapiens
tgctgcgtgactgtaaggtcttcctgcccayaggttgctcctggctattagtactactaat

SEQ ID NO: 1059 - DNA, 61 bp, Homo Sapiens
aacttttgagatgcactggttctcgctcacmtttgcacgtttgtcattgctgttgttgttt

SEQ ID NO: 1060 - DNA, 61 bp, Homo Sapiens
agttttttaggtaacttgttttcctctgtgrgtttcaacaaaggaaactatttaatttcag

SEQ ID NO: 1061 - DNA, 61 bp, Homo Sapiens
ttgcactgttcagccaccctttgtgggagargaatcaccccatctggaagatcacagtgtc

SEQ ID NO: 1062 - DNA, 61 bp, Homo Sapiens
gctcctactgcccttggagtgacactgttaygcctccacactttgactcatgtcattgcct

SEQ ID NO: 1063 - DNA, 61 bp, Homo Sapiens
cccccctccatttgagatgctgctctgacartagaatgaggctggggtcccatcgtggcac

SEQ ID NO: 1064 - DNA, 61 bp, Homo Sapiens
cttcttagcagcctccacttttaccagtttyatagtctaggtctttgcattagtccactct

SEQ ID NO: 1065 - DNA, 61 bp, Homo Sapiens
tgggatggttttaaaactgttgacgttgatkcatcagtggatctaagatctggcactctct

SEQ ID NO: 1066 - DNA, 61 bp, Homo Sapiens
gcaggtgagacacagtgagccttcaacaackaactctctcccaacacagccctgagaattg

SEQ ID NO: 1067 - DNA, 61 bp, Homo Sapiens
tgttagtgaaggcttacatcttagtccaaayggaatgctgatgccaactcccatcaaaaat

SEQ ID NO: 1068 - DNA, 61 bp, Homo Sapiens
ttgaagcactgttagccagttgaaagcttcyattctagccgactttgcctcctaaacagct

SEQ ID NO: 1069 - DNA, 61 bp, Homo Sapiens
gtgtaagaaagccaaacaagttgaccagtcrgtaggttttacccagtctcaaaggaggatg

SEQ ID NO: 1070 - DNA, 61 bp, Homo Sapiens
ttttggcagttcactaattcatttgaaaagwgcttggatggtttaagcctatggttttcag

SEQ ID NO: 1071 - DNA, 61 bp, Homo Sapiens
cagtaagtttacaaagccctttggatcacawgactgctatggtaggtttaaatgcattatc

SEQ ID NO: 1072 - DNA, 61 bp, Homo Sapiens
cagacacaaatgagaatcatctctatccacragagcttttgttaaggagatgtgtccagag

SEQ ID NO: 1073 - DNA, 61 bp, Homo Sapiens
gtgcctactatgtgtcaggtgcagtaacagrcaaaatctctaggaaatactcatgtaaatg

SEQ ID NO: 1074 - DNA, 61 bp, Homo Sapiens
ttcaagtttgacggcaggcagggtgccaaartccccgatgggattgtgcccaagaacctga

SEQ ID NO: 1075 - DNA, 61 bp, Homo Sapiens
catcccaatgagacaacagcctaagaatgtrcagacaaatacaaagcagtgtgagctgggg

SEQ ID NO: 1076 - DNA, 61 bp, Homo Sapiens
cattagaatatattagtgcacttgtaaaaaygtgtagatgctagagccccacccagctcaa

SEQ ID NO: 1077 - DNA, 61 bp, Homo Sapiens
cccaagaggagggaccctcaggacacaggtsgtcattgtgactcaagattatctactcaac

SEQ ID NO: 1078 - DNA, 61 bp, Homo Sapiens
ccctgaaggcctagacaccctatgacctctmactgagatgttggcagccaggcagatgcag

SEQ ID NO: 1079 - DNA, 61 bp, Homo Sapiens
ggaagctgtgcacgagcagtcaggactttgrggacagaagtttagtgttagggaggcaggg

SEQ ID NO: 1080 - DNA, 61 bp, Homo Sapiens
gagctgaagatctaaggagggcccacctccrcgagacctgctgagggcttacatttggtgc

SEQ ID NO: 1081 - DNA, 61 bp, Homo Sapiens
tgggctttggggtggaaggacagaagagtarcagtctaggaaagggactagacatgtagcc

SEQ ID NO: 1082 - DNA, 61 bp, Homo Sapiens
ttaatcctcgcattaatcatgtaatgtagtstttcagccagggctctccagtgtaaatacc

SEQ ID NO: 1083 - DNA, 61 bp, Homo Sapiens
agtgctctgcattcccagttcattcttaagygttggttctttctaaggcagtgtattgctt

SEQ ID NO: 1084 - DNA, 61 bp, Homo Sapiens
ggcttccattcccataggtacctcattgtcyggaatggctgctagagcttcagccattgca

SEQ ID NO: 1085 - DNA, 61 bp, Homo Sapiens
atcccctggtgagaggttttccaaaatgcartaatacagaaagaatttaagggaagttctg

SEQ ID NO: 1086 - DNA, 61 bp, Homo Sapiens
ttcaagtcctatcccagccaaggtcctagcraactcagctcgtggacctgtctctgacggt

SEQ ID NO: 1087 - DNA, 61 bp, Homo Sapiens
attaccactactcagtttaaagcaacaaatsctcattgaatagctactattttttatatac

SEQ ID NO: 1088 - DNA, 61 bp, Homo Sapiens
gtttttctttctacccaggtacttatcatcyctgcacaagcctttgcatcttgaaaatcca

SEQ ID NO: 1089 - DNA, 61 bp, Homo Sapiens
ttccaaaaaacagcaatagaagactccacamgaagattgtgtccattttgacttctctgta

SEQ ID NO: 1090 - DNA, 61 bp, Homo Sapiens
ctaattaattaaaagaggaaagttttaaaaygaacacagcatgaacacaaacttatataag

SEQ ID NO: 1091 - DNA, 61 bp, Homo Sapiens
aaatatgtctaaatcttgcctagaaccaatrtcacaagaataatagctaataaaggagaac

SEQ ID NO: 1092 - DNA, 61 bp, Homo Sapiens
agaacaaagacttggatgtaagtcccaagtyggctatcatgctgtttgaccctcagcaagt

SEQ ID NO: 1093 - DNA, 61 bp, Homo Sapiens
cctagactagttctttgattttaaggcaaasttctttagtaaagttcctaatcattatgta

SEQ ID NO: 1094 - DNA, 61 bp, Homo Sapiens
gatagattcaggaaatcaacaatacccgctrtgtctacagagatactgggtttgaagtctg

SEQ ID NO: 1095 - DNA, 61 bp, Homo Sapiens
agagagggccaagatgcctagtgtctcgaaycagcccaaggagaggccattttactatgct

SEQ ID NO: 1096 - DNA, 61 bp, Homo Sapiens
ggattgagaatttctttgaccgataagtccrgtatataatgtgtcggtgagaattaactta

SEQ ID NO: 1097 - DNA, 61 bp, Homo Sapiens
cattttgatttggtagtatagcaatcaggamagcaattaaccagaacaaaagactacatgg

SEQ ID NO: 1098 - DNA, 61 bp, Homo Sapiens
tggactggccccacttttgcagcatcccctyttgacctattctctgcccagtagccagact

SEQ ID NO: 1099 - DNA, 61 bp, Homo Sapiens
aagtctttatatgcttaggctattaccgacrggtagacgatttttggataattattataaa

SEQ ID NO: 1100 - DNA, 61 bp, Homo Sapiens
ctaaggacttgagtattcaccatttttcccyttatcatttttgttatcaaaatgcattttt

SEQ ID NO: 1101 - DNA, 61 bp, Homo Sapiens
acagaaggctgctttatgtgcaaaaggtagkttaagtctcaaaatataaaatgtgtgtata

SEQ ID NO: 1102 - DNA, 61 bp, Homo Sapiens
cttgatggctgcaagctggcccgttttgacrtgacgaccctgtgaagaaaaaataataaca

SEQ ID NO: 1103 - DNA, 61 bp, Homo Sapiens
ttacagttgttttgtgggtcatgggtagtaktatttaaaacatgggtgcacaggtgcacta

SEQ ID NO: 1104 - DNA, 61 bp, Homo Sapiens
aggaaggtacatctcctgggaagtagagctwtcacacaataatcaattcatgcaaaaagca

SEQ ID NO: 1105 - DNA, 61 bp, Homo Sapiens
cagggagaacagcttcttcataatgtcaagkcctaaccaagaacgctcttcctcttctgag

SEQ ID NO: 1106 - DNA, 61 bp, Homo Sapiens
ctccaaggagtaggcctgaagaaaaaccgtscatcagacaagcacgcaccagtggggtgag

SEQ ID NO: 1107 - DNA, 61 bp, Homo Sapiens
ggacgtaaaagtgttgatctgaggatattasaagacagagcataaaagttggcagatggta

SEQ ID NO: 1108 - DNA, 61 bp, Homo Sapiens
tacaaatgagaaaaaaatatttgtgctattraaaacttggacatctttccattcattttaa

SEQ ID NO: 1109 - DNA, 61 bp, Homo Sapiens
tgttgaataagtggatttggatgtaaccacrggcttgccatatgaaattctattccatggg

SEQ ID NO: 1110 - DNA, 61 bp, Homo Sapiens
atcaattaagatggaaaggaagaagggttasgggagaagcagagtacaaaaataagtttag

SEQ ID NO: 1111 - DNA, 61 bp, Homo Sapiens
aagctggcagtgagagataaagctggcagcragatcaactggatctgtgcctcagaacaca

SEQ ID NO: 1112 - DNA, 61 bp, Homo Sapiens
attaattacaggaaaggagactagatatggrgtaatagcactgtagtttatatgaaaagtg

SEQ ID NO: 1113 - DNA, 61 bp, Homo Sapiens
cagcagaggaacatagggaaggatacatggmttttggcccagctcagaggctggtggtggg

SEQ ID NO: 1114 - DNA, 61 bp, Homo Sapiens
atgagcaccaaaatatatcatgttctccacygtcaagtccttttgactggtgagaaaatac

SEQ ID NO: 1115 - DNA, 61 bp, Homo Sapiens
gtcttcagctgcttcttcaacttctttactytatagtcgctatagccataacgaaccattt

SEQ ID NO: 1116 - DNA, 61 bp, Homo Sapiens
tcatttcttcttccaacaagaagaatctaasacgtatttgacacaaaattggtgtctgacc

SEQ ID NO: 1117 - DNA, 61 bp, Homo Sapiens
ttttaaataaatacaaatgagctcttctcartgtactagagcagagaaaaattctcttttc

SEQ ID NO: 1118 - DNA, 61 bp, Homo Sapiens
atctttatttacatggtagttgataagctgytttccactaatgagaattacatctgaaagg

SEQ ID NO: 1119 - DNA, 61 bp, Homo Sapiens
tcctatttacagatggcatggctgtgcttayggacaatgtatgtgaattattatttttcag

SEQ ID NO: 1120 - DNA, 61 bp, Homo Sapiens
gtttcaatgtatctatatactttatacttaycccatgcaaagggaaaatagtaactttcta

SEQ ID NO: 1121 - DNA, 61 bp, Homo Sapiens
gatttagtgtggggtgatttaacttttgccrctgttgaatgtacactactgtttttatcat

SEQ ID NO: 1122 - DNA, 61 bp, Homo Sapiens
aaggacagcaagatggggtaacctaaaatastgttgatagatcacagaggaaataagctgt

SEQ ID NO: 1123 - DNA, 61 bp, Homo Sapiens
ctccaaatatgaactgagccgtgggcatagrgagaataacagcaaatgagatagttcctga

SEQ ID NO: 1124 - DNA, 61 bp, Homo Sapiens
actatgcacagacacatttttccacattatrttgctgcttcagtaaagatgttgtacttga

SEQ ID NO: 1125 - DNA, 61 bp, Homo Sapiens
atttcaactagtatttccacctgaactcttyggtgcaattacaattatactgtatatattt

SEQ ID NO: 1126 - DNA, 61 bp, Homo Sapiens
taagttctgagagaaagaagatgagtatatyccacagaattcactaattgttttcagggcc

SEQ ID NO: 1127 - DNA, 61 bp, Homo Sapiens
caactgactgcattcccatgagtgactccaytgagtaaggaccacctagctaagctctgtc

SEQ ID NO: 1128 - DNA, 61 bp, Homo Sapiens
tattaggatcctaggaagaggtacaaagccrtcagtgtcacgagcatcatttttaccataa

SEQ ID NO: 1129 - DNA, 61 bp, Homo Sapiens
ccccagaatatgattataggtagaagagagmagtcatctgagtggggctggagctcgagaa

SEQ ID NO: 1130 - DNA, 61 bp, Homo Sapiens
tttaccacgtaggggctgggcctgcacctgygcctgatggccacctggtggggaggagaag

SEQ ID NO: 1131 - DNA, 61 bp, Homo Sapiens
aaagttcatcaaatgattctctgcccatacwtactccctagtggccccagggctataggct

SEQ ID NO: 1132 - DNA, 61 bp, Homo Sapiens
tgggtgtaggtggggtaaagtggactgtggrgtataaaaagtgtacatgggaagggaaaag

SEQ ID NO: 1133 - DNA, 61 bp, Homo Sapiens
cacaatgtattatgcatgtgccgagttgctragtatggctgatgctgcagcccttgttagt

SEQ ID NO: 1134 - DNA, 61 bp, Homo Sapiens
atgatggcaagacagaaattaaaactcatamtctaatgtcaaatcacattcatttccactt

SEQ ID NO: 1135 - DNA, 61 bp, Homo Sapiens
ggagtaatacagaaacttttagccaaggcayattctctgggctctcaatcctttgcagctg

SEQ ID NO: 1136 - DNA, 61 bp, Homo Sapiens
ggactagctttagatgactccttactttcartgatgcaagtcgtataaacaaaatatccat

SEQ ID NO: 1137 - DNA, 61 bp, Homo Sapiens
atggataactgatcaaacacacacaaaacaycattgcgttatgtggcctggctttaaacgt

SEQ ID NO: 1138 - DNA, 61 bp, Homo Sapiens
tagcctgagaccaaagcacgaccaacagctrtacctggactggatccttttcttctctgct

SEQ ID NO: 1139 - DNA, 61 bp, Homo Sapiens
cctgaattctctgcttgttgtggttggtcaytgcatataatacttacagttctgctttttt

SEQ ID NO: 1140 - DNA, 61 bp, Homo Sapiens
atgcctttattcatgctctcccccattcccraacatcctactctttctgaatggccaatct

SEQ ID NO: 1141 - DNA, 61 bp, Homo Sapiens
gcatggcaaagccagtagatagtagtaaatyattgcatgaagttcatcagaataaaatcaa

SEQ ID NO: 1142 - DNA, 61 bp, Homo Sapiens
catgatgctgagactcatctacgcattttaytctagagttaggaagaacttccaattgtcc

SEQ ID NO: 1143 - DNA, 61 bp, Homo Sapiens
aaaaaaaggtggaaaaagaggtatgtagttrttcatggaaagctgacaaacacaggaactg

SEQ ID NO: 1144 - DNA, 61 bp, Homo Sapiens
agaataatccatccttgatgtatattcaagraccttcagttggaagacagatagcagtttc

SEQ ID NO: 1145 - DNA, 61 bp, Homo Sapiens
gttctgcaggttggccaacatgcggaagacrttcccgtccaggtcctgcagtgcgttggtg

SEQ ID NO: 1146 - DNA, 61 bp, Homo Sapiens
cgcaggttgggcatgggcccgaagatccccrgagagagctccttcagggaattcccaaaga

SEQ ID NO: 1147 - DNA, 61 bp, Homo Sapiens
gttgtcttccagtccaataccctaccaggcrtgggagtcttctctacagcttgcttgccaa

SEQ ID NO: 1148 - DNA, 61 bp, Homo Sapiens
gcagaagcaccgtgactcacgagcaaacgcrtaattagcctcgaagccctgggctttgttt

SEQ ID NO: 1149 - DNA, 61 bp, Homo Sapiens
gggttcaccagaaggtgttgacccctgtaakctcaacaacaaggctggagatggagtcaag

SEQ ID NO: 1150 - DNA, 61 bp, Homo Sapiens
cagggcattaagcacccaagccaactcaacrcctgcagatggctcttcctcccagtgcagc

SEQ ID NO: 1151 - DNA, 61 bp, Homo Sapiens
gtggccatggcagacactgtcaggctcctaytgaatttcattctcctctgatttccttact

SEQ ID NO: 1152 - DNA, 61 bp, Homo Sapiens
acagagaaatcgaattactaagttaggggayagataaggcaaacattcattagttcacaaa

SEQ ID NO: 1153 - DNA, 61 bp, Homo Sapiens
attttgactctgatttcttcccatacctttyggagtccacttctccgccactaactttttt

SEQ ID NO: 1154 - DNA, 61 bp, Homo Sapiens
tcctccaggcggtaagaggatctgcgtgtgyccttcgcaggggtccaaagggagagaacct

SEQ ID NO: 1155 - DNA, 61 bp, Homo Sapiens
aaatcacagcatttggggactgcagtttgtytcagccaagaactagagcttggaagtaata

SEQ ID NO: 1156 - DNA, 61 bp, Homo Sapiens
ggcaaatcatgggccccggggccagattccygcaaaccagtgttcctgcagggaccttggg

SEQ ID NO: 1157 - DNA, 61 bp, Homo Sapiens
agtgtgcaaatattactcaaatggcaaacayatgattaggttaaggatgttgagaggagga

SEQ ID NO: 1158 - DNA, 61 bp, Homo Sapiens
gtttaaaaggaaagcctgaagcccacaaacsccatctaagcctcatttcacaaggtttcag

SEQ ID NO: 1159 - DNA, 61 bp, Homo Sapiens
aagaggtagaggaggtcctggctgagagccrcgtgcagaggagcatccgcctggtgtccgt

SEQ ID NO: 1160 - DNA, 61 bp, Homo Sapiens
gttgggctgtgaggaagaatgtaaaggattmggtcatttcagattgtgaaatgggctcctt

SEQ ID NO: 1161 - DNA, 61 bp, Homo Sapiens
agttgtagctgaataaataaaaattcttgtyattgaccacattatttggcatttccctcat

SEQ ID NO: 1162 - DNA, 61 bp, Homo Sapiens
tgaggaatgaggctcacaaggtcaagtgagmtgattggagagggcctgggtaggaaaggct

SEQ ID NO: 1163 - DNA, 61 bp, Homo Sapiens
ttctcactgcttccttatttgtaatgtaaaygatctgaaatgacctaaatgtctctcagtc

SEQ ID NO: 1164 - DNA, 61 bp, Homo Sapiens
gcacgtgaacttgctccctatggcactcttrtagtaattcaagcaattgcagctgtcttgc

SEQ ID NO: 1165 - DNA, 61 bp, Homo Sapiens
gcactggggagccattggagggttttagcayggaattgatagctctaatttgtggttaaga

SEQ ID NO: 1166 - DNA, 61 bp, Homo Sapiens
aagcattgatgttacggctagtactaactayagcctaaactgcaaacaactgaataaaagg

SEQ ID NO: 1167 - DNA, 61 bp, Homo Sapiens
caaggtagggctcagtccacaaaagagagaycgaaaagttagcaaagtacgtttagtaaaa

SEQ ID NO: 1168 - DNA, 61 bp, Homo Sapiens
aaaaaaaaggactgaccaatttctttttcgytgaatcactttcttcatcttctcctcggtc

SEQ ID NO: 1169 - DNA, 61 bp, Homo Sapiens
taaggttgctgcaaatcctgctttagggaarttgatcttgatggccttgttctcacagcac

SEQ ID NO: 1170 - DNA, 61 bp, Homo Sapiens
ctttgagtaggaagcagacagttaggatttygggcctaagaggaaagcgagacttacaggt

SEQ ID NO: 1171 - DNA, 61 bp, Homo Sapiens
tgcacaatgcatatgtatgtcctggccaggmaggaagctcttagttcagtcccaggattcc

SEQ ID NO: 1172 - DNA, 61 bp, Homo Sapiens
cactcttatgtgctaggaagcgtttgttctrtcaagtagccagggtcaacctcaaggaact

SEQ ID NO: 1173 - DNA, 61 bp, Homo Sapiens
gccaggcacaattccaggtagcctacgtacrtaactttatttaatgaattttcctaacatt

SEQ ID NO: 1174 - DNA, 61 bp, Homo Sapiens
aacttatatgtaaagagtgggctctgtatcktgttcactgaggaccagaggaaaggaaatt

SEQ ID NO: 1175 - DNA, 61 bp, Homo Sapiens
gtcttggaaaacaaatgacctgagcttcctwcagtgtgagagggactctaggtaacagaaa

SEQ ID NO: 1176 - DNA, 61 bp, Homo Sapiens
caaccatagtaataatgatggataacaattrttgatgcttactgcattccaggcactgttc

SEQ ID NO: 1177 - DNA, 61 bp, Homo Sapiens
ttttcattatttgtcatccgctagtatacarggtcttcaaggacgtggatttgtgtctttt

SEQ ID NO: 1178 - DNA, 61 bp, Homo Sapiens
ctgcctcttgggaaggagtgggaagacacgrggtgagtaacctggagaaaatgaagggcca

SEQ ID NO: 1179 - DNA, 61 bp, Homo Sapiens
tttgtcactggcagaggaaactgggcatggrgcttatatcccgtgagtgactcctctggcc

SEQ ID NO: 1180 - DNA, 61 bp, Homo Sapiens
acaatgctatgagataggctgtgttattagmactattgtgtagatgagaaaatgagaacaa

SEQ ID NO: 1181 - DNA, 61 bp, Homo Sapiens
gacctacgttgggaagagaagtttaacacaycctaactcctaccaaaaggaaaagaaaaaa

SEQ ID NO: 1182 - DNA, 61 bp, Homo Sapiens
gtagctgggattacaggcatctgccactacrcgtggttaatattttgtatttttagtagag

SEQ ID NO: 1183 - DNA, 61 bp, Homo Sapiens
tggagtaagggattagttctgtgtttccttyggtttggttgttggagcaatattaccagca

SEQ ID NO: 1184 - DNA, 61 bp, Homo Sapiens
atcataatttataagtcataaaatatcaagsagaagagttaacatcactcaaggactttat

SEQ ID NO: 1185 - DNA, 61 bp, Homo Sapiens
tgggctctactgccttgttccatattatttkgtgcacattttccctggcactctgggttgc

SEQ ID NO: 1186 - DNA, 61 bp, Homo Sapiens
caaaattattaatttgagttttttttggatrctgcataatgtcctagagggttaaaaaaat

SEQ ID NO: 1187 - DNA, 61 bp, Homo Sapiens
gtggcaactatctatttaactatgcctaaayagcaatgtcagttgtgccccagtttcctag

SEQ ID NO: 1188 - DNA, 61 bp, Homo Sapiens
gttctgtgtcttaaaattattgatattgtcrttagtcgttgaattaagcatgaaggtgatt

SEQ ID NO: 1189 - DNA, 61 bp, Homo Sapiens
aagcaggaggaggttaaagtacagacaatgrccaagaaacacatccacataaactagtcag

SEQ ID NO: 1190 - DNA, 61 bp, Homo Sapiens
accagtcaactctcgtatattgcatacaacygtagaaggccatcctagacaataatacaac

SEQ ID NO: 1191 - DNA, 61 bp, Homo Sapiens
tggaaagaaaatagacgtaaaaatcaaattmtgtgaagctgctaaagaaaatctctactga

SEQ ID NO: 1192 - DNA, 61 bp, Homo Sapiens
gtagagacagggtttcctgtctcctatgtcrtttcctgtttcctatgttggccaggctggt

SEQ ID NO: 1193 - DNA, 61 bp, Homo Sapiens
gctgtttttgacgacgaagcagacaagaccrgtgaactgagggacagtgatttcagtaatg

SEQ ID NO: 1194 - DNA, 61 bp, Homo Sapiens
ttgctccatgaattctcagtcttaaaaacarggcataaagaaagctaaaattagtgaactg

SEQ ID NO: 1195 - DNA, 61 bp, Homo Sapiens
cagtaaattgggcatttttccaagtattccrtttttcaaaaaggcttatttcattgatgtt

SEQ ID NO: 1196 - DNA, 61 bp, Homo Sapiens
gtgacctgtatggcctccaaaggcactgagwttttaattcctgtggtagtaaatttgagat

SEQ ID NO: 1197 - DNA, 61 bp, Homo Sapiens
taaaaaatattttattgggcaaaagaaaagsaacatcattctgaaagtatttgcaatacca

SEQ ID NO: 1198 - DNA, 61 bp, Homo Sapiens
aattctatattggctttgtgttgactcccamgttaagagaacctccaaatacctcccccag

SEQ ID NO: 1199 - DNA, 61 bp, Homo Sapiens
tcttttctagaggtaaagcatggctgacaamttcatagttcctgaattagcctgttatatg

SEQ ID NO: 1200 - DNA, 61 bp, Homo Sapiens
tgcactcgttattcttctgcttggaacattktttttgccctcagatcttcatatctgcctc

SEQ ID NO: 1201 - DNA, 61 bp, Homo Sapiens
aaacctgaatcaggattagaattctctctcrtatgttccattagcacagatgttcacttct

SEQ ID NO: 1202 - DNA, 61 bp, Homo Sapiens
atctagctaatcagaatctgctctggtttcrtgcacgttaatttttaaaacttatttattc

SEQ ID NO: 1203 - DNA, 61 bp, Homo Sapiens
gggatttgggaggtcattgtggttacttctytgcttttagttagcttgctagccatttcag

SEQ ID NO: 1204 - DNA, 61 bp, Homo Sapiens
gcttttgtgtcttccttgtgggccattacaytttcctgctgcaattacaggttctaataat

SEQ ID NO: 1205 - DNA, 61 bp, Homo Sapiens
cacattttaaaatgtaggcatcccttcgcartaggtactagggttcttagaaattcttaaa

SEQ ID NO: 1206 - DNA, 61 bp, Homo Sapiens
ggatacaggcaaaggaaaactgtactaggcraggcccatagaataaattgacaggattatt

SEQ ID NO: 1207 - DNA, 61 bp, Homo Sapiens
ttgcttctctgaaattcaatgcataactccygataatccatccagttcattcaagaagtat

SEQ ID NO: 1208 - DNA, 61 bp, Homo Sapiens
tcacattcccctagttacacaatttttctgrtaaccctgaatcttgggatcttttacagtc

SEQ ID NO: 1209 - DNA, 61 bp, Homo Sapiens
gtcctgaaacagaaaattaaaactctgactsagtgttgtcaggcattgtagaaaagatgtt

SEQ ID NO: 1210 - DNA, 61 bp, Homo Sapiens
taattcaaacatttaaattccaaatctgtaygtccatgtaaatagtggggaaatttttttg

SEQ ID NO: 1211 - DNA, 61 bp, Homo Sapiens
gctctgaaaatgctgctctgtagatatgacmttttctgctttgctgtagacagtgtaattc

SEQ ID NO: 1212 - DNA, 61 bp, Homo Sapiens
agcaggccatgcttaccttagaactggagcrgtcggccctgctgcagacggtggaggagct

SEQ ID NO: 1213 - DNA, 61 bp, Homo Sapiens
atttagaacagaaaggttgcacagctcttayatactcaaacatagttttagagttagatca

SEQ ID NO: 1214 - DNA, 61 bp, Homo Sapiens
cctcctgagtaacagggtaggtgggagggcytcctaagaactcctttgtccaggagcccca

SEQ ID NO: 1215 - DNA, 61 bp, Homo Sapiens
tatttttcctgataagtcatgccaactggtrtcaagtctcatctggatgacatattttgtt

SEQ ID NO: 1216 - DNA, 61 bp, Homo Sapiens
ggcccagagccttaatggaggaacccagttsaggaaggagagaatgtatttctgccttttg

SEQ ID NO: 1217 - DNA, 61 bp, Homo Sapiens
tctgtagaagctgccaggctctttctgaccytgtgttgtttaatccaacctaaatatgaaa

SEQ ID NO: 1218 - DNA, 61 bp, Homo Sapiens
cattttgcctacttcttcattcttggaccarctatcagaaaatttaccatcagggatctcc

SEQ ID NO: 1219 - DNA, 61 bp, Homo Sapiens
atggaacaaattggagaacatgagtttagckcttcaaccaagtgggtttgccaatcctcaa

SEQ ID NO: 1220 - DNA, 61 bp, Homo Sapiens
tgaatacgtgattctgtaatcaccaccatcrtttcagatttttgtagcatgtttctcacag

SEQ ID NO: 1221 - DNA, 61 bp, Homo Sapiens
tcagtgagtcatgagttcttcctttttcagytagtcaggcctggcttttgttcaagtcctg

SEQ ID NO: 1222 - DNA, 61 bp, Homo Sapiens
ttgattgttttcaaccagcattgaagtggcsgctacttatatggcagtgtttgttggaatg

SEQ ID NO: 1223 - DNA, 61 bp, Homo Sapiens
cctggctttggggatttcccttgattacagmtagcctatatacattgcagaatacagaaaa

SEQ ID NO: 1224 - DNA, 61 bp, Homo Sapiens
attctccaagcagtgagaagtcacctgttaygacacctgtaagtcactcattttaaggaat

SEQ ID NO: 1225 - DNA, 61 bp, Homo Sapiens
ggagtcttcaataagagacttaacatgaggyatatggaagatgaggcaccgagataagttc

SEQ ID NO: 1226 - DNA, 61 bp, Homo Sapiens
atacaagatgtctttaacttgagaatgttgygatagagaaagttagttctttgtaacctat

SEQ ID NO: 1227 - DNA, 61 bp, Homo Sapiens
tacttaccaaacgggatggtaacttggacaytgtgtcagggaagaggcacttggtcctctg

SEQ ID NO: 1228 - DNA, 61 bp, Homo Sapiens
aagtagatgaatggcctcagacattttcaawcgttatttatttatttatttattgagacag

SEQ ID NO: 1229 - DNA, 61 bp, Homo Sapiens
actagaagtttctagagggcaggagcttatrgagttttgaatctctcctatttagcatgac

SEQ ID NO: 1230 - DNA, 61 bp, Homo Sapiens
tgaaaaccaaggtgttgatttgctagagatrgattttgtcagatgagaaggctctggggaa

SEQ ID NO: 1231 - DNA, 61 bp, Homo Sapiens
atttaaatctggattgtattactctggctcygagattctacattctagcctaggtaataaa

SEQ ID NO: 1232 - DNA, 61 bp, Homo Sapiens
atatttcatttgtgcattccaatgatttaayttagtaagctcaataagcttatctctagtc

SEQ ID NO: 1233 - DNA, 61 bp, Homo Sapiens
cagtatattattttctctttgttttttaagrttgaggccatttgctttcgattcaaaggat

SEQ ID NO: 1234 - DNA, 61 bp, Homo Sapiens
gttaggaggacaaaagataacttcagtgaaygctaggcctaaataccaactcactcagttg

SEQ ID NO: 1235 - DNA, 61 bp, Homo Sapiens
atcttagaagagagagagaaagacagggacrcttgtaattattacttaccatatggctaaa

SEQ ID NO: 1236 - DNA, 61 bp, Homo Sapiens
agtggtatgaggtactgtgtagagcaatgawtcacaattatttttgcactttgatttgaga

SEQ ID NO: 1237 - DNA, 61 bp, Homo Sapiens
agtctctaaattttccttctcattttacttyctgtccttgcattcttggcacactgataat

SEQ ID NO: 1238 - DNA, 61 bp, Homo Sapiens
aactctctcagcagagttcgtagtcttgtgyttccctttctacttactcatgatctcctct

SEQ ID NO: 1239 - DNA, 61 bp, Homo Sapiens
atatagtttcacatagcgctgagagaaaatrtatactactatctctgcacactgaaaacaa

SEQ ID NO: 1240 - DNA, 61 bp, Homo Sapiens
tcagtcaacagtctcttaaaggagagtttcracagcagaaagacatttaagtcagagaata

SEQ ID NO: 1241 - DNA, 61 bp, Homo Sapiens
ttcaaaaagtatttttgtttagcaatgttakaatagtagcagtttcatctttttgatgctt

SEQ ID NO: 1242 - DNA, 61 bp, Homo Sapiens
acttaataatgcttaagttctagaatatgamtgcctgaggttcttagtttttttttttttt

SEQ ID NO: 1243 - DNA, 61 bp, Homo Sapiens
acatatggtttgatttctttatttccaggtytcctcagttgcgaaattaggatgttaatta

SEQ ID NO: 1244 - DNA, 61 bp, Homo Sapiens
ctaaattttctcattgctatcagcaacatargtaaagtgtccttctcatatatagctcatt

SEQ ID NO: 1245 - DNA, 61 bp, Homo Sapiens
tctatacttgggaaataacaaaggaccggtraggctagacggcatagatagtggagataag

SEQ ID NO: 1246 - DNA, 61 bp, Homo Sapiens
tagcacaaatacaacctaatgtagccaagtyctgagagagcaagcaaattcattcaacagt

SEQ ID NO: 1247 - DNA, 61 bp, Homo Sapiens
gtatgatttcttacaactatgtgtgagtctrtagttatctcaaaataaaatgttaaaaaaa

SEQ ID NO: 1248 - DNA, 61 bp, Homo Sapiens
attctttcttcttttgcccatgatttgtatkttgtttttcttatggaaatcttttagaact

SEQ ID NO: 1249 - DNA, 61 bp, Homo Sapiens
actaatttatatttcttcctcttcctattckttggccattttccctgtgtattttttgttt

SEQ ID NO: 1250 - DNA, 61 bp, Homo Sapiens
acatttttctttcagagaagccattttaagrtatccaaggcaagccacactatagattaag

SEQ ID NO: 1251 - DNA, 61 bp, Homo Sapiens
tcttgtgtgactagatcactgtatgctattycagaattctatcctccctttcaacataact

SEQ ID NO: 1252 - DNA, 61 bp, Homo Sapiens
tattttagtcactattcctgcactctttcgyttattctagagaaaagtgggctaaactatt

SEQ ID NO: 1253 - DNA, 61 bp, Homo Sapiens
catcagcctgtacacttgatgtacactttaraggccagacaggtgtaatattcgggcagat

SEQ ID NO: 1254 - DNA, 61 bp, Homo Sapiens
gtgagaaattcaaacaggcctggaggtttcyttatgagagaaacttctcctctcacaagta

SEQ ID NO: 1255 - DNA, 61 bp, Homo Sapiens
aggatggacaggctgagctggatggcattcrgaacctaacctttgcctgagcagaagtgag

SEQ ID NO: 1256 - DNA, 61 bp, Homo Sapiens
atggacatagatgcaatattttcttggtctscaaaaaaatagcaaggtaagaaatgtgccc

SEQ ID NO: 1257 - DNA, 61 bp, Homo Sapiens
ggccaacctctgctgccgaccagcatctacscggtaccttccctggagccacactttgccc

SEQ ID NO: 1258 - DNA, 61 bp, Homo Sapiens
aataaggctcatgcctttctggagttcacarttaagcaaggaatacgaccttatatgtata

SEQ ID NO: 1259 - DNA, 61 bp, Homo Sapiens
ccaaattcatatcttcactaattgtaactargaacatttgagatttttgcaaaatgtaata

SEQ ID NO: 1260 - DNA, 61 bp, Homo Sapiens
ctctagggaaaatcctggtatttgctttccrgtttaaaaaaatttaattatcaagatcctg

SEQ ID NO: 1261 - DNA, 61 bp, Homo Sapiens
atctctcagtattcacacgagctggcttaaygggcagcctaacctgctagatcagggctcg

SEQ ID NO: 1262 - DNA, 61 bp, Homo Sapiens
cagcatgcccgtgggcaacaacatagataamgtcctctccaggtaggtggctcccagtggc

SEQ ID NO: 1263 - DNA, 61 bp, Homo Sapiens
ctggtcaatgtgatacttcccgctgttagcstaggatacctaggagggaaggctggatgtc

SEQ ID NO: 1264 - DNA, 61 bp, Homo Sapiens
tatgggatagcctcaagcctcggacacaaargagtttgtattcacactcaagcttttcttt

SEQ ID NO: 1265 - DNA, 61 bp, Homo Sapiens
tttcacaaaatacagataaccaaccaaggcyttgaatgtgctcaaccgcactaacatctag

SEQ ID NO: 1266 - DNA, 61 bp, Homo Sapiens
cttcagcctccctgattccccttctggttgragatttagtgatcagtttgcaccatgaaat

SEQ ID NO: 1267 - DNA, 61 bp, Homo Sapiens
accatggccaaagcacttctgagctggccasggaggaaaaagatgtgtgactgccagctgg

SEQ ID NO: 1268 - DNA, 61 bp, Homo Sapiens
cctacactggcagatcatagcattttttcayttccccaggttgttctcctcatagggttaa

SEQ ID NO: 1269 - DNA, 61 bp, Homo Sapiens
atttgggcaggttctttaacctcactgaacytcattctcctcatctgtaaaatgggacaca

SEQ ID NO: 1270 - DNA, 61 bp, Homo Sapiens
ttcaggcaagattgtagccctgaccaacacrctgcagccccgtgggagatcttggggcaga

SEQ ID NO: 1271 - DNA, 61 bp, Homo Sapiens
tcacaacagtgcctggagaacttcttttgcwccttaaaatacttcatctgtctcataagcc

SEQ ID NO: 1272 - DNA, 61 bp, Homo Sapiens
ggaaaaaaatagctaaagaggacatggcaargatgcctgatgacattagactttccactgt

SEQ ID NO: 1273 - DNA, 61 bp, Homo Sapiens
gggggtgcagagagctaagattgaaggtgtkaagatcagttaggacactattttaagaatc

SEQ ID NO: 1274 - DNA, 61 bp, Homo Sapiens
ggaatgtccctataggtaagtgggatgatayaagttttagggcaatggtaacctttttaga

SEQ ID NO: 1275 - DNA, 61 bp, Homo Sapiens
tcaacatatgaaggagacagctaattggctmttctatgcaaagtcagcttttaaaatgaca

SEQ ID NO: 1276 - DNA, 61 bp, Homo Sapiens
aagtcaaccaatctgggcaatgataccaagytgaaatcacagacctgcccataacccccag

SEQ ID NO: 1277 - DNA, 61 bp, Homo Sapiens
gattcattttcacatgcagtctcttttgatycattccgtcaagactatacactatattttg

SEQ ID NO: 1278 - DNA, 61 bp, Homo Sapiens
agggcgtttctaatgctctctcactcacaamgttactagctcaagtgcctcaaagtgtagc

SEQ ID NO: 1279 - DNA, 61 bp, Homo Sapiens
gtcatatttcttctatcaaaatgtaatttgygcccatcagtcaacctctctgcaaatacta

SEQ ID NO: 1280 - DNA, 61 bp, Homo Sapiens
tcctctgaatagattccaatgtggcttcaayactgggctttattgctttatccaccagctc

SEQ ID NO: 1281 - DNA, 61 bp, Homo Sapiens
gttaaatgcaaagagctgaagttgttagtaytcacagaacagaaatttttagctaacagta

SEQ ID NO: 1282 - DNA, 61 bp, Homo Sapiens
aacctctcattcaagtgaactatcctcatargcagtcgagatacaatatttttttaaagtt

SEQ ID NO: 1283 - DNA, 61 bp, Homo Sapiens
ctgaaattcatgagctcagaggcttgtctcrtttccagatttgttgttatctttgtaacaa

SEQ ID NO: 1284 - DNA, 61 bp, Homo Sapiens
tagtcctatcacattctttaactccaaaatytccctcataaaataagtaccttgggtggta

SEQ ID NO: 1285 - DNA, 61 bp, Homo Sapiens
aactggctgacttaaaagatcttgaatttaygatcaactatatatctctcctgatgaccat

SEQ ID NO: 1286 - DNA, 61 bp, Homo Sapiens
tttttttttttttaaactaaggcataagcayagatgtgagtctaggcctacagagtcagaa

SEQ ID NO: 1287 - DNA, 61 bp, Homo Sapiens
acacaatgattgataattacagtgttgagakaatcatatgctgagatttctttctttgtgt

SEQ ID NO: 1288 - DNA, 61 bp, Homo Sapiens
tcacctgccacattccagatgggaccaggtwgtatgttctcgaacttctttgttctctagt

SEQ ID NO: 1289 - DNA, 61 bp, Homo Sapiens
ctctatgtgaatatgaggactcttatgcccwctaatgttcttgaatagcctagatcaagag

SEQ ID NO: 1290 - DNA, 61 bp, Homo Sapiens
tgctatcataatgacatattcacagttcacractttcacacatatgggtcttctttttgaa

SEQ ID NO: 1291 - DNA, 61 bp, Homo Sapiens
ttcttcaaaaacattactttgtggtctcacytcagttgcaagcacacatggctgtacatgt

SEQ ID NO: 1292 - DNA, 61 bp, Homo Sapiens
tttttgatttgtttgtttcactgtttttcargtctgaatagcttgcatttgtttaaagcag

SEQ ID NO: 1293 - DNA, 61 bp, Homo Sapiens
actactgacaagttctcagaactgagtgcayctttgcttaagctgtgctctctgcctagaa

SEQ ID NO: 1294 - DNA, 61 bp, Homo Sapiens
taatctgagtcttccttactttggctccaargatcccctaaaagactgccagagaatgaga

SEQ ID NO: 1295 - DNA, 61 bp, Homo Sapiens
ataaggcaccacggccttttggttctgtgtyttcaccaaaagtcacatccatcccatcacc

SEQ ID NO: 1296 - DNA, 61 bp, Homo Sapiens
tctaggaggtaatcttaggaaaaccagtccrcttttgactcatgtctatatgtgaagcatt

SEQ ID NO: 1297 - DNA, 61 bp, Homo Sapiens
aataaataaataaataaataaataagacacrgtaaaggatcatgtttgattttccccctga

SEQ ID NO: 1298 - DNA, 61 bp, Homo Sapiens
caggcagggcctgaatttggccagcatgccrtggtttgctgacccatgttatggttcttat

SEQ ID NO: 1299 - DNA, 61 bp, Homo Sapiens
ccttccactggaagaatctcaaacagcgctrcttactcaggatcagtggcaccagccaact

SEQ ID NO: 1300 - DNA, 61 bp, Homo Sapiens
gctgctatttttcctttaaattgtatttttyagagtgagcacctgcttagtaagaattagc

SEQ ID NO: 1301 - DNA, 61 bp, Homo Sapiens
gacgttagcttcatttttaacgagcctatcratgaatttcattctttttccccttttgtaa

SEQ ID NO: 1302 - DNA, 61 bp, Homo Sapiens
gaatctcttatagtttgtttgtgcctgtatstgggaagttctggatgacctttgactgtat

SEQ ID NO: 1303 - DNA, 61 bp, Homo Sapiens
cctaatctatctacgaagctcatctgcagcrtctgtttttggggagccttccctgaatgcc

SEQ ID NO: 1304 - DNA, 61 bp, Homo Sapiens
tgtatttaccaatctaattctatcaaaatayaggttatggccaatctttaagaaataatga

SEQ ID NO: 1305 - DNA, 61 bp, Homo Sapiens
gtctttgcccttgtcactaaatatatttctygttggtggatcatatctgatagtattccta

SEQ ID NO: 1306 - DNA, 61 bp, Homo Sapiens
gacagctagtgtgaaggaagagaacaaaagkaggatacaccccatcccttcaaaggcataa

SEQ ID NO: 1307 - DNA, 61 bp, Homo Sapiens
ttcaatatagcaccattcatagaccttaatragtgactttatactgtggcaaaaaggggaa

SEQ ID NO: 1308 - DNA, 61 bp, Homo Sapiens
atcacacactgacaaaaaagagtggggcatyattattaacttgtatcaatcattattcatt

SEQ ID NO: 1309 - DNA, 61 bp, Homo Sapiens
gtagtcaacaacaggggaatgtagtcaacarttgagaaagtaaacaagaaactggactaat

SEQ ID NO: 1310 - DNA, 61 bp, Homo Sapiens
acagcccactgctcaccttacacagttcttragcgtttctctcaagtgccttcacagtata

SEQ ID NO: 1311 - DNA, 61 bp, Homo Sapiens
attatcagtgcttttatagatgaggtcaacraagattttgctccacactatacaaacaagg

SEQ ID NO: 1312 - DNA, 61 bp, Homo Sapiens
ctattgttaattgtcttttaacattcatacyggagatataaattattgtcacacgacaatt

SEQ ID NO: 1313 - DNA, 61 bp, Homo Sapiens
agtgtatacaaaaattccaaagacaacctaytagaagcagtaagtttaccatatcattgct

SEQ ID NO: 1314 - DNA, 61 bp, Homo Sapiens
gtaaacaacagagtagttacatcctctcaarctacttctacttaaattactttattacaaa

SEQ ID NO: 1315 - DNA, 61 bp, Homo Sapiens
cattataattggcgtcctactgctgtcagayttactctaacaaatagattactgtttatta

SEQ ID NO: 1316 - DNA, 61 bp, Homo Sapiens
gacatctattattacctctatacttgtgctrctcaggatgcgtgtcttacttgcaaagagc

SEQ ID NO: 1317 - DNA, 61 bp, Homo Sapiens
gaaatagtttacatgaaatggtgaccaaatrtggactcaaagctatgaaaatgtactatac

SEQ ID NO: 1318 - DNA, 61 bp, Homo Sapiens
aggtggaaaaccaaaagttatggtctagcastgtctttgcatcaaatattttcacataatt

SEQ ID NO: 1319 - DNA, 61 bp, Homo Sapiens
attagtctgccccacaagcgaagggttaacygtgtcagtgactggtcatctatgcatgcgg

SEQ ID NO: 1320 - DNA, 61 bp, Homo Sapiens
aaaacagagcttttaattaagaattgattcmctgtttcccagcaagagtgaatattatatc

SEQ ID NO: 1321 - DNA, 61 bp, Homo Sapiens
tctcatagagacatcatgagaacaaaataasaacactgtgaagaggttgtcatacttttaa

SEQ ID NO: 1322 - DNA, 61 bp, Homo Sapiens
actccattgcatatgcagttaaaatgcaccrgagaactctgccaagctggagcagtatgtc

SEQ ID NO: 1323 - DNA, 61 bp, Homo Sapiens
agagagatagttagaagtttgtggggagatyacgaaagatagctaaattgactttattcgg

SEQ ID NO: 1324 - DNA, 61 bp, Homo Sapiens
tattccaggcaagggaagagcaaatgcaaasaccaagagttgggcacatgctaagtgtgtt

SEQ ID NO: 1325 - DNA, 61 bp, Homo Sapiens
aatataagagagtgcactgcaatgttttcartgtaaaagccagtgatttagttgaagtggg

SEQ ID NO: 1326 - DNA, 61 bp, Homo Sapiens
caagaagtccatatccttctccgatcagtcytcatgtgaagttcttaatcattcttcaagg

SEQ ID NO: 1327 - DNA, 61 bp, Homo Sapiens
caagattaccccgagaaagaaagtagcagtsattcttagccctcttaggaactggataaaa

SEQ ID NO: 1328 - DNA, 61 bp, Homo Sapiens
accttaatttattttaacagataacattatrcaattagcgatgctgagattaaatcagata

SEQ ID NO: 1329 - DNA, 61 bp, Homo Sapiens
attcctaactcattaatgccacctaaatccrccccagtctctacatctcccctgctaccat

SEQ ID NO: 1330 - DNA, 61 bp, Homo Sapiens
catttttcattcatgtgttgaagcttataarccatttccgtgctatattactgtcatattc

SEQ ID NO: 1331 - DNA, 61 bp, Homo Sapiens
gcacttgaacaataaaagaaatggatttccraactgagtgcaacgttttctgggctttata

SEQ ID NO: 1332 - DNA, 61 bp, Homo Sapiens
ttatgcttctaacaacattgatgtatactaraagcagagtgttaacattttacccaaacca

SEQ ID NO: 1333 - DNA, 61 bp, Homo Sapiens
taatgccaaaatttatattgccaccaactcygtaccattttcatggctgtttgttattgtt

SEQ ID NO: 1334 - DNA, 61 bp, Homo Sapiens
cccactgtgtaaatgttaaaaacggtgggargcaaaataagatcacattgcaattttgtct

SEQ ID NO: 1335 - DNA, 61 bp, Homo Sapiens
ctcatctatctacagaaaaaggtggtttgtrtcattccatatgagtcagtattttgctgag

SEQ ID NO: 1336 - DNA, 61 bp, Homo Sapiens
aatttctaaagaagatttcttccactgctcraaggaaacaaatcgagatgccttgaggcac

SEQ ID NO: 1337 - DNA, 61 bp, Homo Sapiens
gtttgaggaaaagcaaggtcagcctagcagkagtacaataagcaaggggaagcagggataa

SEQ ID NO: 1338 - DNA, 61 bp, Homo Sapiens
cgaggcaatccagcacctcctttggcacacmgtggtgactgggcagatactgatttattct

SEQ ID NO: 1339 - DNA, 61 bp, Homo Sapiens
gaatgtaggtggaagtgtacgccacgttgargcctagttaataaaccctcccatgagtaat

SEQ ID NO: 1340 - DNA, 61 bp, Homo Sapiens
tagcacctttgggggaacttggggaagtagyaatgaatggtggtctctatggtaagactta

SEQ ID NO: 1341 - DNA, 61 bp, Homo Sapiens
cacttcttaccccaaaatatacagatgaatsatttaaccttatgagaccttggttttctca

SEQ ID NO: 1342 - DNA, 61 bp, Homo Sapiens
ccttgcaccttacatattttgttctcacacyttttaccacaatattaatagctaactttac

SEQ ID NO: 1343 - DNA, 61 bp, Homo Sapiens
tacctggcgagtcagggaattgaagagaatsaacctcatattttgagtgtaagtcaatttt

SEQ ID NO: 1344 - DNA, 61 bp, Homo Sapiens
gcatgaacaagtcaggtataaatatatccawctttggaaacaaaatcaggagacattcact

SEQ ID NO: 1345 - DNA, 61 bp, Homo Sapiens
ctctacatcttccacagccatattatcacaytcaaggcttggtcagcagacttggctctga

SEQ ID NO: 1346 - DNA, 61 bp, Homo Sapiens
tagatggcacaagttctggacctagaaaatrcaaaaggcaatggttaaatcagccctattt

SEQ ID NO: 1347 - DNA, 61 bp, Homo Sapiens
aaacatccaggggaaatgcagtgtatgaaawgaagcctgaggaagaaagtcagatcctgaa

SEQ ID NO: 1348 - DNA, 61 bp, Homo Sapiens
catggatgaatctctctaaggctgagcttcrtgatacatagagtggagatgatgtttctca

SEQ ID NO: 1349 - DNA, 61 bp, Homo Sapiens
cgtaattttcactaagctcatataatgtatyacaaaaagcatcaagacatcaaatgacaga

SEQ ID NO: 1350 - DNA, 61 bp, Homo Sapiens
aataattacaaaactacatcacctcgtcaaratcactttagaactaaaaaggaagaaaaaa

SEQ ID NO: 1351 - DNA, 61 bp, Homo Sapiens
taggacactaagaaatcattgtccacatgarctaaacaagtatctctgttatctaaatgga

SEQ ID NO: 1352 - DNA, 61 bp, Homo Sapiens
gaaataattgatgatggttgatcaattagcrgaaggatgagtcatatgtcacagttcttcc

SEQ ID NO: 1353 - DNA, 61 bp, Homo Sapiens
atcaaccaagggagtgatataaactgcattmatttcaagtggtctaacttagttattgtca

SEQ ID NO: 1354 - DNA, 61 bp, Homo Sapiens
gagttggaatgcacaatacttttgcttaatyttactcctgttacattcaggaaaataaaag

SEQ ID NO: 1355 - DNA, 61 bp, Homo Sapiens
atactttgttactgtattatcactattccayttgctgacagatctagtttaaaatataaaa

SEQ ID NO: 1356 - DNA, 61 bp, Homo Sapiens
gaaccccaccaccactatgaccgccatcackcattggttcctcaaaaattgaataattatc

SEQ ID NO: 1357 - DNA, 61 bp, Homo Sapiens
ttcattaatctattaagtgcctattatatgrtactatggaggccaaaagtagtgaactaaa

SEQ ID NO: 1358 - DNA, 61 bp, Homo Sapiens
cagatagatcctcaccatcatctgaacactygaactggacttccttttctgaattgaccag

SEQ ID NO: 1359 - DNA, 61 bp, Homo Sapiens
attgagattgtaagaaatagttgccttagcyattatattgtttgcctggagctaaaaagca

SEQ ID NO: 1360 - DNA, 61 bp, Homo Sapiens
tcttcctttgtcagcagcatatggtgaaatsagttgaagaaaaaaaatgaacacagcatct

SEQ ID NO: 1361 - DNA, 61 bp, Homo Sapiens
gattgagagcttataacatccagaagcttasagaaaagcctctatctatgaatattcgctg

SEQ ID NO: 1362 - DNA, 61 bp, Homo Sapiens
gccaagggggtgctgtggagattcaagatayattcaagttctgacagattcaagttctgaa

SEQ ID NO: 1363 - DNA, 61 bp, Homo Sapiens
atgcctcagggaagaccatatggaagatagrcaaaagcaaatacaaagatcctatagcaag

SEQ ID NO: 1364 - DNA, 61 bp, Homo Sapiens
aaggtggtacattgataattttaaacatcayccagacaggctgcagttgacatttccaata

SEQ ID NO: 1365 - DNA, 61 bp, Homo Sapiens
aacctaatcagtattgtaatggggaaggtayggagcattcaactatagagagacatcaagt

SEQ ID NO: 1366 - DNA, 61 bp, Homo Sapiens
tgataaagaggacagggagcctagagagctrcagagtttaatagaaagttcctggctcaaa

SEQ ID NO: 1367 - DNA, 61 bp, Homo Sapiens
taaatgatacaggtgaatttgccagtgttayaatttttgagattatgtctcataaatttaa

SEQ ID NO: 1368 - DNA, 61 bp, Homo Sapiens
aaatcctgtatttttgttactccctgaagarctgaaaaggaggtagaggtcaagtcattgg

SEQ ID NO: 1369 - DNA, 61 bp, Homo Sapiens
gtagggaaaataactattcttgaggaaaacrcattcagaatttaaacagaaaacaatgtgt

SEQ ID NO: 1370 - DNA, 61 bp, Homo Sapiens
cctggagcagggagaaacacaaaatgaatcrgtaacagaggcagcactcgaggtaagagtc

SEQ ID NO: 1371 - DNA, 61 bp, Homo Sapiens
cggagaaaaaccaagggtttgagtaaatcarcataatttggacagatctctagaaagaaaa

SEQ ID NO: 1372 - DNA, 61 bp, Homo Sapiens
ggtgcagctctggcagaacatggtaataggygtccataacccaggtctctccatctccctc

SEQ ID NO: 1373 - DNA, 61 bp, Homo Sapiens
tggtacagtgttcctgcagtgagcaacttaytgaaatgtgtactctcagagctcatttctc

SEQ ID NO: 1374 - DNA, 61 bp, Homo Sapiens
tacatgcaatttttatttgtcaattataccktaacagagctgggtgaaattttaaaaaaaa

SEQ ID NO: 1375 - DNA, 61 bp, Homo Sapiens
taattgaaatgaaatgaggctgagggaaaakagcaggtaggagaccataatgactgtatga

SEQ ID NO: 1376 - DNA, 61 bp, Homo Sapiens
aactagaatagtatctagaaattacttgaaygaatcaatgaatgccaatattatgtttatg

SEQ ID NO: 1377 - DNA, 61 bp, Homo Sapiens
aataacacatacatgcatttgttcagtctcytataggccataaattacttccataaatatt

SEQ ID NO: 1378 - DNA, 61 bp, Homo Sapiens
ctaggttattactatcttacactggtcaaakaaaaaaccagaagtgtcatttctaaaatta

SEQ ID NO: 1379 - DNA, 61 bp, Homo Sapiens
aaaaagaaagaaagaaatagatagaagtccrtttgtcagaaagttctggaaggattcctgc

SEQ ID NO: 1380 - DNA, 61 bp, Homo Sapiens
ttacgtcaccctcacttatcttactgtgccyatgctatgtggcagttttcttgtctacctg

SEQ ID NO: 1381 - DNA, 61 bp, Homo Sapiens
gaattatgagcatgtggtttaaaatcagaarggctacaataaaaaagaataggtgcctgcc

SEQ ID NO: 1382 - DNA, 61 bp, Homo Sapiens
ccgtggtggcagggattctatatagaaaaarcacctggatctcagcctttcaatggcttca

SEQ ID NO: 1383 - DNA, 61 bp, Homo Sapiens
atatttgagagacaggcaatgtagagatgtsacaaactggaagtccatgaattatttctga

SEQ ID NO: 1384 - DNA, 61 bp, Homo Sapiens
actttggttaatttatcaaggaaattttgcmatgattatcctgtcctataatgcgcaagtt

SEQ ID NO: 1385 - DNA, 61 bp, Homo Sapiens
tcaccacgtagaacaccagagcattgccaamgagcgccagggcgaagatgagcacgccggt

SEQ ID NO: 1386 - DNA, 61 bp, Homo Sapiens
taaatgtgaattcatgcctactttcaacctrcactgctctgattgccaagtctactgagaa

SEQ ID NO: 1387 - DNA, 61 bp, Homo Sapiens
tttatatgacaacctcacacctcctataagraagagcctgctgtgcaagattctctgtgca

SEQ ID NO: 1388 - DNA, 61 bp, Homo Sapiens
ggtctaaattgagcggaccacccaggaggaygttggaataaaaagaaatgggaagggggtg

SEQ ID NO: 1389 - DNA, 61 bp, Homo Sapiens
gaatagcacctgtagactctgggagtgaaaygcactgggaatgacattagagaaagcctgc

SEQ ID NO: 1390 - DNA, 61 bp, Homo Sapiens
tctggttgtatgaattttaggcaatggatcragatatggcaacagttaaaataaaataaaa

SEQ ID NO: 1391 - DNA, 61 bp, Homo Sapiens
cacagatgcatattcatccagcaagtattcrctgatggccctctacaggtcaggaagtgtg

SEQ ID NO: 1392 - DNA, 61 bp, Homo Sapiens
ttatggcatctgttcctcccaaaagctctaygtgtacccacctgataatggggctttggca

SEQ ID NO: 1393 - DNA, 61 bp, Homo Sapiens
ataattaattactcatactatgacttacttkttggcttcacttgtgatgaataaaaatctt

SEQ ID NO: 1394 - DNA, 61 bp, Homo Sapiens
gctgctgtgtgtcccccagagaggttttcayggagcttgggggctcctgggtcagaccccg

SEQ ID NO: 1395 - DNA, 61 bp, Homo Sapiens
ttgctgctgctgttgctgctgctggatatayggcatcaaggggtttttgttggggttggcc

SEQ ID NO: 1396 - DNA, 61 bp, Homo Sapiens
cctactccaacctctgaaaacaacaaactayaaaatgctcctttcttgacaaaaatgtacc

SEQ ID NO: 1397 - DNA, 61 bp, Homo Sapiens
tagcaaactaatgaaactgataatttggttygaacatgtctctgtcctctcagtgtcttag

SEQ ID NO: 1398 - DNA, 61 bp, Homo Sapiens
gggaactgaggcaaatggagatattaggaayaagaatggagatattaggtgtgactcttct

SEQ ID NO: 1399 - DNA, 61 bp, Homo Sapiens
tcttcctacccaggtgtttttgtcaggctayccttcttcactgaaagccaaggcctttaaa

SEQ ID NO: 1400 - DNA, 61 bp, Homo Sapiens
cattcatcagactgatgctccctatatgtgrtaagccatttttctcttggtgctgtcaatg

SEQ ID NO: 1401 - DNA, 61 bp, Homo Sapiens
caaaccaggtttacacagagactactatgcytttttcaaaggaaagatgaaaataattcaa

SEQ ID NO: 1402 - DNA, 61 bp, Homo Sapiens
aaattcatgggctgtggttaaatttggctcrcagatatgtcttaatattgtgatcattttt

SEQ ID NO: 1403 - DNA, 61 bp, Homo Sapiens
aacataagattaaaaaatgaatagagcatcracaaaatcaaaggttggtttattgaagata

SEQ ID NO: 1404 - DNA, 61 bp, Homo Sapiens
agagttggtcaaacccaatgaaaggagggcygaaacaacaaaaggcaacaataaaaacagg

SEQ ID NO: 1405 - DNA, 61 bp, Homo Sapiens
tgcttagacataacaaaacactcggcatttmaaatgtgctgtcaaaacaagtttttctgtc

SEQ ID NO: 1406 - DNA, 61 bp, Homo Sapiens
ttttaaaatttaccctcaaaagttgatgatytactaccattgagaaatttaagaattctat

SEQ ID NO: 1407 - DNA, 61 bp, Homo Sapiens
ttttctttttctctttcttccattatttacrgcgtgaacttcttgtgctgccatccattga

SEQ ID NO: 1408 - DNA, 61 bp, Homo Sapiens
tacttaagaattgtgggctaggtctattttkggggtagctatttggggcttttcccccagt

SEQ ID NO: 1409 - DNA, 61 bp, Homo Sapiens
ggcatctttagggtgaggggcattattctgyctaacatgctacttttgctcttgagatggc

SEQ ID NO: 1410 - DNA, 61 bp, Homo Sapiens
tataatcattcactaaagattgcctactaaragataagagtggccaggtatgtacatgtgt

SEQ ID NO: 1411 - DNA, 61 bp, Homo Sapiens
attgtcagctaacctttacttgcacatgtayggtagcagggagtttgctactttgggtatc

SEQ ID NO: 1412 - DNA, 61 bp, Homo Sapiens
tggtgatcttcttcttcttttggttttgtcygtatatgaggaccgtgccagagtgtgagtg

SEQ ID NO: 1413 - DNA, 61 bp, Homo Sapiens
catcagagatagataattttctccacctgtrtaatgatttcatctctatctatatttcccc

SEQ ID NO: 1414 - DNA, 61 bp, Homo Sapiens
aaacaattataccttcctctagagttctgcraagtttatttatttacttttattgttaatt

SEQ ID NO: 1415 - DNA, 61 bp, Homo Sapiens
aacagtatggagagtccaacagtgcagtttgytaaagaagtctgccaaaacctagtgttga

SEQ ID NO: 1416 - DNA, 61 bp, Homo Sapiens
tcctcatgcagcaattaaaagcactaacacyggaatagtttggacctctgattgagacaac

SEQ ID NO: 1417 - DNA, 61 bp, Homo Sapiens
gaaatggtgaccggttcatggttgggggctkgttatttcctgcttataaaatttttgttga

SEQ ID NO: 1418 - DNA, 61 bp, Homo Sapiens
gttatttcctgcttataaaatttttgttgaytttgaagggcctatgccttacatcaaccca

SEQ ID NO: 1419 - DNA, 61 bp, Homo Sapiens
tcaagaaaacctcaaaagtgtcaacagcaayggtagatccatatgactaggccttcattcc

SEQ ID NO: 1420 - DNA, 61 bp, Homo Sapiens
tccttcttattaagatcaggacaatggtttkaaatcacatctagccaatcagataactgaa

SEQ ID NO: 1421 - DNA, 61 bp, Homo Sapiens
aagccaccacgcctggccttattgtttccaytctaatactcttcaatgcactctgaatata

SEQ ID NO: 1422 - DNA, 61 bp, Homo Sapiens
tactctggtttgtgttgtcccttcagtgackgagaactctaaaccaatttgcaatccgaca

SEQ ID NO: 1423 - DNA, 61 bp, Homo Sapiens
atttggggttatgaggagtaaaataaatgcyggtattaatggctaaattctaaaagataag

SEQ ID NO: 1424 - DNA, 61 bp, Homo Sapiens
acatgtcatctaaaggatagaaactttcacrggatgttctcaaaaagacaaacttcatgga

SEQ ID NO: 1425 - DNA, 61 bp, Homo Sapiens
tgaaaatctttcctggcatccattttttcartaattgtgtgagcttctaactccttggaat

SEQ ID NO: 1426 - DNA, 61 bp, Homo Sapiens
agtggcaaggaagggcacagagaatagctaygacttctgggcccagttttaggagacaaaa

SEQ ID NO: 1427 - DNA, 61 bp, Homo Sapiens
tgtctttattagcagtgtgagaacagactartgtggtagaatggtagctggtaggggggtg

SEQ ID NO: 1428 - DNA, 61 bp, Homo Sapiens
cagtgtactgggtctaagagagattgttgcrtagttagtccagaagagattcaaacatggc

SEQ ID NO: 1429 - DNA, 61 bp, Homo Sapiens
attgggttggccaggaccagcagtacaattsagatagggcttgctgagttctagtgttaca

SEQ ID NO: 1430 - DNA, 61 bp, Homo Sapiens
tgggcttatgtaatatttgttaattaactcmaagatccattcagggaagaagggggttaaa

SEQ ID NO: 1431 - DNA, 61 bp, Homo Sapiens
tgctgggtgatttgtttcctccatcaaagcwtagacttcattagtgtagaccaggtctgtt

SEQ ID NO: 1432 - DNA, 61 bp, Homo Sapiens
aagctttcctcttactcacagcaagattaamataaaggcacagtggagaaaggaatgagag

SEQ ID NO: 1433 - DNA, 61 bp, Homo Sapiens
tgaaggactgaccctatatgtactatgcccygtttatttacaaatattaggtggccacgtt

SEQ ID NO: 1434 - DNA, 61 bp, Homo Sapiens
atttaagattaaaaacaatataaaaatccarcatccaaattgcagaagccaagtattgcct

SEQ ID NO: 1435 - DNA, 61 bp, Homo Sapiens
gtttccagaggggtttagaccaaagtcaacmgttctgccaattttgttgaatgtgggggaa

SEQ ID NO: 1436 - DNA, 61 bp, Homo Sapiens
agattaaagagtgattagtactagacaaaargatgacccttagagttattttatagattta

SEQ ID NO: 1437 - DNA, 61 bp, Homo Sapiens
ttctcccatgtcctgcctaatgccccaaaayagagtgaaattatagctcagggactaatag

SEQ ID NO: 1438 - DNA, 61 bp, Homo Sapiens
acttgatgctctactggcactgatcaaaggstgtcctagtttgagtggagagggatggttc

SEQ ID NO: 1439 - DNA, 61 bp, Homo Sapiens
aaaatgtttctgacttgacacttatagaccrtttaccacttgaattgtgatgccattttcc

SEQ ID NO: 1440 - DNA, 61 bp, Homo Sapiens
ttttaacaggaaatgtaaaatattctgctcraatggtttagaaaaatcttctcagaactcc

SEQ ID NO: 1441 - DNA, 61 bp, Homo Sapiens
aagatgttaaagaacatccatctggtgaatsatttcatatccagtcatagaggaagaaagt

SEQ ID NO: 1442 - DNA, 61 bp, Homo Sapiens
ttaatagtggttgcgataaatatctggttcrgcaaaatatgagacaaagcaaactatgctt

SEQ ID NO: 1443 - DNA, 61 bp, Homo Sapiens
tcttatgataaaaaacaaagccttgaactcraagacagctgtgggaaggccttgccagcat

SEQ ID NO: 1444 - DNA, 61 bp, Homo Sapiens
tgtgtctgaatttttctgactactgttatakgtagtaggttcctacagtttttgtttattt

SEQ ID NO: 1445 - DNA, 61 bp, Homo Sapiens
gtacacaaaaagattgaattaaaaatacatwcttttgtgaactacttgggagaatctattt

SEQ ID NO: 1446 - DNA, 61 bp, Homo Sapiens
aacaaccttatctaacatcaaattcgtgttwtcatctttatataaggtagaacaggagtct

SEQ ID NO: 1447 - DNA, 61 bp, Homo Sapiens
catcactcttcctttcagagttcataaaagmattttgcaaccattaaagttctatacaaac

SEQ ID NO: 1448 - DNA, 61 bp, Homo Sapiens
cactgcatgccaggggtactgaaactttgamatttgctaacatggcacatataccttgaag

SEQ ID NO: 1449 - DNA, 61 bp, Homo Sapiens
atgaagacttttttcaaaacccaagttcttygtaatgcactttattcagcatatgaccata

SEQ ID NO: 1450 - DNA, 61 bp, Homo Sapiens
gggaatgtgtggatatgttgctctcttattyatgcctcatgtataaaaaacattgctttgg

SEQ ID NO: 1451 - DNA, 61 bp, Homo Sapiens
tgtgatgtctttatacacttaggttactagratgatcaatttataaaacagaagtcaatat

SEQ ID NO: 1452 - DNA, 61 bp, Homo Sapiens
tgattagtagaaatgaacttagatgggaatygaacctgtctaagcccatgaactgtttcaa

SEQ ID NO: 1453 - DNA, 61 bp, Homo Sapiens
ataactgcaaatataagaaccaccattacgwgacttgttatttgcacatttaaaaattatt

SEQ ID NO: 1454 - DNA, 61 bp, Homo Sapiens
tgctttaaatattaaaaattcagcagtttasttagaagcctcaactattaaaatctctgtc

SEQ ID NO: 1455 - DNA, 61 bp, Homo Sapiens
ggagaggctggcaccttgatcttttgcagcrtcctaaactgtgagaaataaatttctgttc

SEQ ID NO: 1456 - DNA, 61 bp, Homo Sapiens
tgtgtttgttactacctctcttccatattayaccaaactttgagttggatggggagtgact

SEQ ID NO: 1457 - DNA, 61 bp, Homo Sapiens
tattgttgaaatatgtctttattaaaagtaytcagtaaaagcaatatgtggctttttataa

SEQ ID NO: 1458 - DNA, 61 bp, Homo Sapiens
caggaaaagtcaaaagtcattttctatgatmtaaccaatagcaaatggagaatgactgaga

SEQ ID NO: 1459 - DNA, 61 bp, Homo Sapiens
aacacacttggatcatatgtgcaacttagcyattacttcctttcttcatctcctcccacca

SEQ ID NO: 1460 - DNA, 61 bp, Homo Sapiens
aaaaatagtattttgaggctttaaagtagtrtttggcacataggaagtccccatcaattgt

SEQ ID NO: 1461 - DNA, 61 bp, Homo Sapiens
aaatgcaaataatcatatcgctgcctctatktttcaactgcatacactgcttaaaatattt

SEQ ID NO: 1462 - DNA, 61 bp, Homo Sapiens
aataattactgaaatctcaaactctactacygttttctctgagaactctagagagatgctc

SEQ ID NO: 1463 - DNA, 61 bp, Homo Sapiens
gcttgtcactcctttcactattattagctascacatggttcagaactttcacacacattgt

SEQ ID NO: 1464 - DNA, 61 bp, Homo Sapiens
agaatttttaccaaaaataacctttggtacytgcatgatattttgctaactgcatctgtgg

SEQ ID NO: 1465 - DNA, 61 bp, Homo Sapiens
tgagatgatgcttcttaatgtaaaattgacyggcatgactaccaatgaatatttgatgtga

SEQ ID NO: 1466 - DNA, 61 bp, Homo Sapiens
acatacaaagtacctgctaattgactgtttrtgttataggcaaggcttcttctggtcagta

SEQ ID NO: 1467 - DNA, 61 bp, Homo Sapiens
taagatttttgtttaatataaatactggtawcattcagacaccttaaaatatagcccttat

SEQ ID NO: 1468 - DNA, 61 bp, Homo Sapiens
gcaattacacactattttctgttaaatgacrtggtagaccacctgagaatatttcaaaaat

SEQ ID NO: 1469 - DNA, 61 bp, Homo Sapiens
cttcgtattatccaggcttgggtattcctgwagagcaatgcaaatgaactaagacaagtat

SEQ ID NO: 1470 - DNA, 61 bp, Homo Sapiens
taatttttcagtttactccagtgatcataawgttttggactatgaattcaattaaagcagt

SEQ ID NO: 1471 - DNA, 61 bp, Homo Sapiens
taggaaggggcaaaactgggattcacatccrcctaccacaatctaacaaccttgatttttc

SEQ ID NO: 1472 - DNA, 61 bp, Homo Sapiens
aacgtgaagtgactgacttaggacggtaatkaggatggtaacatttaatgctatgttctat

SEQ ID NO: 1473 - DNA, 61 bp, Homo Sapiens
cttgattgaggtctgtgatgtttaatgttakgtgtcaactcagctaggtgacccagatgtt

SEQ ID NO: 1474 - DNA, 61 bp, Homo Sapiens
atcacggtttgacttcctgttatcattctcrgaactacttagataaagaaacacagtcttc

SEQ ID NO: 1475 - DNA, 61 bp, Homo Sapiens
gcttcttacttttctctaacaaacatgaatraaacctagtaaaatctccaaaccaaagatg

SEQ ID NO: 1476 - DNA, 61 bp, Homo Sapiens
gcccatgaaataaaaggccctttctgagctyctctaatagggtcttcatattcctcaaagt

SEQ ID NO: 1477 - DNA, 61 bp, Homo Sapiens
cttgtacttgtttcctaacaagtggtagaayaaaatctggtaaaacaggcttctcattttt

SEQ ID NO: 1478 - DNA, 61 bp, Homo Sapiens
ggtgaagttagactgactttagactagagaygctgagtttcaagaaattcacaagtcacag

SEQ ID NO: 1479 - DNA, 61 bp, Homo Sapiens
aaatttagtacagccataatattctcggctmctaagctacaaaataacaccttaaaaatga

SEQ ID NO: 1480 - DNA, 61 bp, Homo Sapiens
ctgctaggataccatctggtagccagaaaarcaccaagttctccccaggtctttgtggaac

SEQ ID NO: 1481 - DNA, 61 bp, Homo Sapiens
gtaaaaagactcctttttccaccagttaggkcagcattgattggagataatgggttaaatc

SEQ ID NO: 1482 - DNA, 61 bp, Homo Sapiens
gccagataattaattcttatgattgtggatkgattaaaattgtgtaaaggtcataaataca

SEQ ID NO: 1483 - DNA, 61 bp, Homo Sapiens
gaatattgagtctatttctgcagaccttagygaaatggaataattcagaatccagcaagcc

SEQ ID NO: 1484 - DNA, 61 bp, Homo Sapiens
gcccctgttgcatggaattcttgtttaatgwcttgaatattacagagtggcagcagctgcc

SEQ ID NO: 1485 - DNA, 61 bp, Homo Sapiens
aataggactaaactgctggtctcctgaactstgatagagaaatccaatcaaaagcttttcc

SEQ ID NO: 1486 - DNA, 61 bp, Homo Sapiens
catgctcatggcattacttccttaaaacttygagtaggatacagaaggaaataaagacagt

SEQ ID NO: 1487 - DNA, 61 bp, Homo Sapiens
tgggagttgagggagaagactggctttttamtttctaccttgctgttgttttaatttttaa

SEQ ID NO: 1488 - DNA, 61 bp, Homo Sapiens
gttatcacatggtgggtatcacaatggatgraaagtgattgtggcatttagtaggatgggg

SEQ ID NO: 1489 - DNA, 61 bp, Homo Sapiens
ataagcaacgtggtgtgtaatttacaagaasacttaaagaactctcagtaccttggtgccg

SEQ ID NO: 1490 - DNA, 61 bp, Homo Sapiens
agtttaactgggcttactaggcaagatgtgstactaaatgggcatctagtttaatgtataa

SEQ ID NO: 1491 - DNA, 61 bp, Homo Sapiens
ggatgacttggacaaccctccagaaacaagkttagctgggagaaacattgtcctggtgtaa

SEQ ID NO: 1492 - DNA, 61 bp, Homo Sapiens
agagaaaaggtttaagacctcttagcacagyttctaacacatagtatagtcagtgttcgta

SEQ ID NO: 1493 - DNA, 61 bp, Homo Sapiens
tgagatacctgaattaacatttctaggtctyttgttcaaatgttaataaagccagtgcttc

SEQ ID NO: 1494 - DNA, 61 bp, Homo Sapiens
cctgtgaataattggcagcccaatttgcagkggcttacattaataggggtctattttttac

SEQ ID NO: 1495 - DNA, 61 bp, Homo Sapiens
aaaagaggactggcagttcagaggcttttayacagaagaaccacattaaaagttaaagatc

SEQ ID NO: 1496 - DNA, 61 bp, Homo Sapiens
tgtcctgctgcaataggcttctaccaaccaragagtcagttagaaaatatgaatcagttta

SEQ ID NO: 1497 - DNA, 61 bp, Homo Sapiens
ctgtgtttgaaatctctatttagctagccaygtggatgtgtcaggccggtagttgcaaata

SEQ ID NO: 1498 - DNA, 61 bp, Homo Sapiens
ccagatggaaaaatccactgattgcacaacrtatggaataaacccagacccaggcacgtca

SEQ ID NO: 1499 - DNA, 61 bp, Homo Sapiens
catcatcatcatcatcatccccctcacaatwaccgtgtggtggttaattttgtgtgtcatg

SEQ ID NO: 1500 - DNA, 61 bp, Homo Sapiens
taaacacccagatttaatctgacctacaaarcaaatagggctaaaacactgggcacgttta

SEQ ID NO: 1501 - DNA, 61 bp, Homo Sapiens
gatggttatcttggccaaggtgtttatgcargagtgcgggtactaagatgattctagattt

SEQ ID NO: 1502 - DNA, 61 bp, Homo Sapiens
  misc_feature (31)..(31): n is a, c, g, or t
agaacatttacacactttcaaatgatcctgntaactattccatacatatgatatcattggc

SEQ ID NO: 1503 - DNA, 61 bp, Homo Sapiens
atccagctttcttagtctcacctagctttawgaaaaatgagaggctagatattttgctgtt

SEQ ID NO: 1504 - DNA, 61 bp, Homo Sapiens
actggactttggctatgtatacaccaggttygtgactgttgaacaggatgatgtttgagaa

SEQ ID NO: 1505 - DNA, 61 bp, Homo Sapiens
tttcaatataatgatggcatgacttttagcytgtacttgaacttgtttggtccagtcttgt

SEQ ID NO: 1506 - DNA, 61 bp, Homo Sapiens
atgtgtgctgagagtacagatctagttacaytgtgacctgctggtggtgaccttcagctcc

SEQ ID NO: 1507 - DNA, 61 bp, Homo Sapiens
attgtagaattatgacttatgtcttacttgscaaatttttctgaatgtgacctttttttgc

SEQ ID NO: 1508 - DNA, 61 bp, Homo Sapiens
ttttggagacagggtctcattccgttgcctktgcagtggcacaatcacaatcacagctcac

SEQ ID NO: 1509 - DNA, 61 bp, Homo Sapiens
taaaaacaagattgccacaagaaagaaatawgtttgctgagatttaaaagtctttatgtta

SEQ ID NO: 1510 - DNA, 61 bp, Homo Sapiens
ttgttgatttcctaaatctcatttgaccacytgtctccatttctattctcactatcctaga

SEQ ID NO: 1511 - DNA, 61 bp, Homo Sapiens
aggctgcatccacagtactgagaagcagacraactacaggccttgccccaactacacctcc

SEQ ID NO: 1512 - DNA, 61 bp, Homo Sapiens
aatggctatgtatatccctggggtgcaaccraaagagacacatgaaaagccctctaccact

SEQ ID NO: 1513 - DNA, 61 bp, Homo Sapiens
ttaaagcaagttggattacttggttatttgyttcttcccaacactctgcaaagtatttgac

SEQ ID NO: 1514 - DNA, 61 bp, Homo Sapiens
cagaagtcagaagagaggcgcgaagcagatycttctctggaccgcagaggtgtggcccttg

SEQ ID NO: 1515 - DNA, 61 bp, Homo Sapiens
caaatatttaaacttttattgacccccttcrcagaaaaagcttctattggcctccaaaata

SEQ ID NO: 1516 - DNA, 61 bp, Homo Sapiens
tagtggctattcttagttaactagttccccraaatacagtgacttattttcttgtacctgt

SEQ ID NO: 1517 - DNA, 61 bp, Homo Sapiens
tcttcggttcctcaagtacctcttttcaccwgccatttgcattgaagtctgccctgtctca

SEQ ID NO: 1518 - DNA, 61 bp, Homo Sapiens
ttattgtatctggtatcaggaagaattctargagaagaaagcctgattcccaataaggttt

SEQ ID NO: 1519 - DNA, 61 bp, Homo Sapiens
tcttcggggtacacagatggggtttctttarcatggtaactgtcatttcgaaaactagaga

SEQ ID NO: 1520 - DNA, 61 bp, Homo Sapiens
gctggacttactatgatctgtgttaatttgwttgctagattgaattttcttagctcaagct

SEQ ID NO: 1521 - DNA, 61 bp, Homo Sapiens
ccgaatctgagcacagcaggatgacaaatayagaagcaaggatgggtggtctgtgggaggg

SEQ ID NO: 1522 - DNA, 61 bp, Homo Sapiens
tattaataaatatttatgacaaggacaaatygtggtttgaatatattcactttctaaatta

SEQ ID NO: 1523 - DNA, 61 bp, Homo Sapiens
ttccaaagtatgaattggcagggatccatcygttaaatcaaatgaccagataggccctctc

SEQ ID NO: 1524 - DNA, 61 bp, Homo Sapiens
gccccatggcaaagaacagaagcaagatagrtgaagactgatggcctgatttaagacttac

SEQ ID NO: 1525 - DNA, 61 bp, Homo Sapiens
cgaggcgaggagcactgagtggtccatgttyattatttgccgtttcacatgggcaaggtgt

SEQ ID NO: 1526 - DNA, 61 bp, Homo Sapiens
catgttggtgataagaaagaaagaaaggggytggggtaaggaagaataaaaggagataaat

SEQ ID NO: 1527 - DNA, 61 bp, Homo Sapiens
atagtgacctctggccctgcactcccctacstaagcctgttttccaccaagatgcccgatc

SEQ ID NO: 1528 - DNA, 61 bp, Homo Sapiens
ttcctgacatcctccaacaccacaattgcargtggttttcaggtatgatgtaaggaatgtc

SEQ ID NO: 1529 - DNA, 61 bp, Homo Sapiens
ccaccaccactctgataggtactggcccacsttagatctactacagcttctctaattaaaa

SEQ ID NO: 1530 - DNA, 61 bp, Homo Sapiens
gagatttgggtagcagacgtatttgtcacaytaaataaggagaggaaatagctttgtcaca

SEQ ID NO: 1531 - DNA, 61 bp, Homo Sapiens
gctatcaccaaaatcgagaggaagcgtttcyatcactccacgagcttctttgtggcccctc

SEQ ID NO: 1532 - DNA, 61 bp, Homo Sapiens
agcactctgaagcctgtgccggctcaaggckgtttatggatttagggtgccctgccataaa

SEQ ID NO: 1533 - DNA, 61 bp, Homo Sapiens
caattccaaggcatattaaaaagtcatgatyaaaggggcttaccacatgaagtacaagaat

SEQ ID NO: 1534 - DNA, 61 bp, Homo Sapiens
gaagagagaagagcaggtgcctgagggtcaygccaattacctggtcagttgcatgcacaag

SEQ ID NO: 1535 - DNA, 61 bp, Homo Sapiens
tctgatcttgcctcttcacatcagcacattratgacatgacacatggacgttgaggactcc

SEQ ID NO: 1536 - DNA, 61 bp, Homo Sapiens
gctgtcctccagagcatggcccctgaagtaygtgaacggtaaagctagtctgtggagttaa

SEQ ID NO: 1537 - DNA, 61 bp, Homo Sapiens
caaggacatgaagttcacaattcattaaaawactaagtactgtgagctacaaaattagaaa

SEQ ID NO: 1538 - DNA, 61 bp, Homo Sapiens
aacttctaaaattatttctgaatacagttgsagataggctggttttcatgaggaagctcgc

SEQ ID NO: 1539 - DNA, 61 bp, Homo Sapiens
tttctgcctcttggccaagaatgaaaaaccrgagaaagtcatggatcccaggcattctacc

SEQ ID NO: 1540 - DNA, 61 bp, Homo Sapiens
taaaggaaaggagcccttcgtgaggttgctytgtttaccccgtatagtaacactcgtctgc

SEQ ID NO: 1541 - DNA, 61 bp, Homo Sapiens
agtcccctttaatcagcatccttacctgtcrtgggtgttatcttttttctctctctctttt

SEQ ID NO: 1542 - DNA, 61 bp, Homo Sapiens
taaaagtgcagtgtggagtgagaacacagtrcagcaaatttttaatgtcagaaagtagcaa

SEQ ID NO: 1543 - DNA, 61 bp, Homo Sapiens
gagaccagaccagaacattcttgttcaacawaattatcagaaggcccaagataattgcatg

SEQ ID NO: 1544 - DNA, 61 bp, Homo Sapiens
aatccaagagcaggaatggtcaccaattatycagaaaatctctggattatctaaaatcagc

SEQ ID NO: 1545 - DNA, 61 bp, Homo Sapiens
ctttttttaagaactggttttgccgggactrgtaatgccttctgtaaaatcccataaccta

SEQ ID NO: 1546 - DNA, 61 bp, Homo Sapiens
gggtgctggcaatgttgtttctcaatctgartgagctttacacaggagcgttgatgtatgt

SEQ ID NO: 1547 - DNA, 61 bp, Homo Sapiens
taagtgaagcagccttccctgtggttatctrttccagaggttggcaaactagggcctgcca

SEQ ID NO: 1548 - DNA, 61 bp, Homo Sapiens
agctgtgacatttttctggggaaatgactayggtttgggcacactgtccttcccccactct

SEQ ID NO: 1549 - DNA, 61 bp, Homo Sapiens
aataacgcattacctgtatgttatacctatwtgccaaccttagaatcatggttttctcatt

SEQ ID NO: 1550 - DNA, 61 bp, Homo Sapiens
ttgcctatattcccaaaggattaaaataaakctaagtacatttccccaaagtttgaaacgg

SEQ ID NO: 1551 - DNA, 61 bp, Homo Sapiens
cttagtttttgagtcccgagttaaatctcartagaggtggtgaaggaaatttagcattgtc

SEQ ID NO: 1552 - DNA, 61 bp, Homo Sapiens
atgcagacacaagatgcagacagcttccacrctcatcagtggcttggcaggtgaaaaagaa

SEQ ID NO: 1553 - DNA, 61 bp, Homo Sapiens
ctgctagaacacacgacatgaaattaggaaygacagtaaggctagaatctgtatcacgaag

SEQ ID NO: 1554 - DNA, 61 bp, Homo Sapiens
taattagcacatgaaaagtgaacatgaagarataaacagaggtgatttggagaggtgaaac

SEQ ID NO: 1555 - DNA, 61 bp, Homo Sapiens
cacaaaatatgtgtcaattccacaatccacmaagagttttttctcttcaccaaactcctcc

SEQ ID NO: 1556 - DNA, 61 bp, Homo Sapiens
gaacaactctcatgtatacaactgaaaaatyacaaaggtgtattcacttaacacaaagtga

SEQ ID NO: 1557 - DNA, 61 bp, Homo Sapiens
gatgggcaggattccaaaggccaggtgcatyacattacggaattcagcttcatcctgaaca

SEQ ID NO: 1558 - DNA, 61 bp, Homo Sapiens
catgcttaacactgggaatacgctaaccttycatgaacttgtgctgtggtggaggagacag

SEQ ID NO: 1559 - DNA, 61 bp, Homo Sapiens
tgagcaactaccatgttccagatgtcatgcktaacactgggaatacgctaaccttccatga

SEQ ID NO: 1560 - DNA, 61 bp, Homo Sapiens
actggcaacttccctcttccagaaacgagayagatacaaaaggaacttcagtaacatgaag

SEQ ID NO: 1561 - DNA, 61 bp, Homo Sapiens
tagaacgagttgcggaagttcatggatgttrcatttgcaaagattcaaaacacaaatcaag

SEQ ID NO: 1562 - DNA, 61 bp, Homo Sapiens
caacaatcaatgtaaatggcttaaacttgcrattaaaggaaagagagtctcagctgttttt

SEQ ID NO: 1563 - DNA, 61 bp, Homo Sapiens
actaattattctatttttacttaaatatcasaggagaaagaaacttccaaagcagctttat

SEQ ID NO: 1564 - DNA, 61 bp, Homo Sapiens
aatatgaagtcaatcctagtgtcatatagaygaaatgccacaatgtttatcaatctcaact

SEQ ID NO: 1565 - DNA, 61 bp, Homo Sapiens
attgcattacactaaggtatcctgggaataytgaaattgctttttaactaccataaaaaag

SEQ ID NO: 1566 - DNA, 61 bp, Homo Sapiens
accccaaaaagctcagtgactgtctcaaaastaatctatccatctgatgtttaaaaaatac

SEQ ID NO: 1567 - DNA, 61 bp, Homo Sapiens
cacgtgtcgactcatgagcttggtatagcascctggattcctgcaaccttcataaggtctt

SEQ ID NO: 1568 - DNA, 61 bp, Homo Sapiens
gagaaggtaaggagcctcaagcgtgtatggyggggggaattgaaattttgaataaggtggg

SEQ ID NO: 1569 - DNA, 61 bp, Homo Sapiens
atgccagagcattgtcaggaggcagggaaayagactccataactttatggaagttgctgta

SEQ ID NO: 1570 - DNA, 61 bp, Homo Sapiens
gtataccagcaagcagcctcgacacttcccraacttcctccttgctgaactgcatcacgtc

SEQ ID NO: 1571 - DNA, 61 bp, Homo Sapiens
tcgcgtttctctttttcttgacttctctttyacaattccttaagaaaaggtcttgccatgc

SEQ ID NO: 1572 - DNA, 61 bp, Homo Sapiens
gagtaccaagagctgggacgttatcaagaawgaggaattttgctaaaaatgtgaatcaatt

SEQ ID NO: 1573 - DNA, 61 bp, Homo Sapiens
gtcacgattccacaaagacataatgtcgtartgtcaagggtactgtgggctcctaggggag

SEQ ID NO: 1574 - DNA, 61 bp, Homo Sapiens
tagaatctgtgaaaggaaaatagaaactcakgaccacagttcattatgcttgaaagaaaaa

SEQ ID NO: 1575 - DNA, 61 bp, Homo Sapiens
aagagacaaatgtatgggagcagcagaatayttaatcacttttctgatgtgtgcagatacg

SEQ ID NO: 1576 - DNA, 61 bp, Homo Sapiens
gtgaggaaaactttgactactcttatggcawcgtggtaataacacaggaatgggaatttta

SEQ ID NO: 1577 - DNA, 61 bp, Homo Sapiens
ttgactcattaatgaatacatttaacacttwcctgttgacagacatagcttgctgtgtgct

SEQ ID NO: 1578 - DNA, 61 bp, Homo Sapiens
ctgccacccacacttaccccttgccaccgakgcatagaggcatagtccaggcaaacgttgc

SEQ ID NO: 1579 - DNA, 61 bp, Homo Sapiens
atgagaatggtgctagcttcaggccaaggtrtaggagacattgagcatcctatgtctgaat

SEQ ID NO: 1580 - DNA, 61 bp, Homo Sapiens
ttttaaaaagaatcagagtgtgttcagaaargggacattgcctatagatattagatattgc

SEQ ID NO: 1581 - DNA, 61 bp, Homo Sapiens
attctaactggtgctgacttgaagctgagtwtcaacgcttaggcacagagaccgaatattt

SEQ ID NO: 1582 - DNA, 61 bp, Homo Sapiens
tcactgtgatttaatattaattaaggtaggrtttccacaccaccagaacacctatcccact

SEQ ID NO: 1583 - DNA, 61 bp, Homo Sapiens
taaaacatcggcactattaatctttcacacrctttgttaaaagcttacacacaaatatacc

SEQ ID NO: 1584 - DNA, 61 bp, Homo Sapiens
tgtgggtgctgtgataaacaatgtgtctgasgccatggagactcttacccgaatcacagag

SEQ ID NO: 1585 - DNA, 61 bp, Homo Sapiens
tcccaaccttggagaagaaagaatcagaaayatttaagccttctgcagtggacatgccaca

SEQ ID NO: 1586 - DNA, 61 bp, Homo Sapiens
aggttgccatggagttgggactctaagcaaygtttcctaaactgcggcccttcaaccagct

SEQ ID NO: 1587 - DNA, 61 bp, Homo Sapiens
ccaaggcacatccctgtcctcttcagattcytttcaactctccactttatcttcctcagga

SEQ ID NO: 1588 - DNA, 61 bp, Homo Sapiens
gtgtcacttccatgtgccaacatttttgcasaacatatgcagacatttgaaaacccacatt

SEQ ID NO: 1589 - DNA, 61 bp, Homo Sapiens
aagctccatgacccaagcataattctttggwtttctatgttaaccctagcacagaaagatg

SEQ ID NO: 1590 - DNA, 61 bp, Homo Sapiens
atggatcagtactgttctgtggccttttagraaccgggcaacacacagcaggagttgagtg

SEQ ID NO: 1591 - DNA, 61 bp, Homo Sapiens
aagagttgacaacctactagagtcagtcaaygcagttatgttagagaaggtaaaggcgcaa

SEQ ID NO: 1592 - DNA, 61 bp, Homo Sapiens
gccttctttccctttgttcatgaaacagagraaacacccatcactggtaattaatggtagc

SEQ ID NO: 1593 - DNA, 61 bp, Homo Sapiens
ccagcctggctgtaagctgctatgctcacaygatattcagtgcctggtttcaaatctccaa

SEQ ID NO: 1594 - DNA, 61 bp, Homo Sapiens
gggtttgatagtatcaagaaaagtgattgtycactaagattgagattggcaatgggcaagg

SEQ ID NO: 1595 - DNA, 61 bp, Homo Sapiens
tttagtaaatgtgaatccagggagattgttyatgctcagatggctaggtaagaaaaagaca

SEQ ID NO: 1596 - DNA, 61 bp, Homo Sapiens
agaattgtatctcattggacaaaagggataygattgtgtctcttctgtgctgccacatgcc

SEQ ID NO: 1597 - DNA, 61 bp, Homo Sapiens
ttcttcgagcctccattattaaaggaatgayctatggtgctttctctggagaaagccaagc

SEQ ID NO: 1598 - DNA, 61 bp, Homo Sapiens
atgcaatcggtctaccccagcaagtcctacrtcattcacagcagggtgcagtagggaggcc

SEQ ID NO: 1599 - DNA, 61 bp, Homo Sapiens
ccaaataatagactcccttcccttgatgcayttattttgtattaaagacaaatggtatttc

SEQ ID NO: 1600 - DNA, 61 bp, Homo Sapiens
tcatctgttcaggctggttagttcccctttycaatccacacagagaaagacagaaaagaca

SEQ ID NO: 1601 - DNA, 61 bp, Homo Sapiens
cagcatccttgtgacagaaagctgcaagaakggcactttttgattcatacagggatttctt

SEQ ID NO: 1602 - DNA, 61 bp, Homo Sapiens
gatgatacagtttttaactgctggatcagcracgcctatttcaagtagtgatactaactaa

SEQ ID NO: 1603 - DNA, 61 bp, Homo Sapiens
tagggttgctaggttttgggagcctgggatrggggaaaacagtagaggagacatacttatt

SEQ ID NO: 1604 - DNA, 61 bp, Homo Sapiens
atttttttttcaactcagcaagccttgatgytaaaagaatagatgtatgtactacagttgt

SEQ ID NO: 1605 - DNA, 61 bp, Homo Sapiens
aataagatggacttattggacataatcatcrccatttaaaatgatttggataggtgccatg

SEQ ID NO: 1606 - DNA, 61 bp, Homo Sapiens
agtttgctctgaagtgtaatttatatctttkgctcagaagccacatgctttctcagtagca

SEQ ID NO: 1607 - DNA, 61 bp, Homo Sapiens
gggctatttgaaatatactctgcgcatttaytattcaagtcatctagttatttggataaaa

SEQ ID NO: 1608 - DNA, 61 bp, Homo Sapiens
gaaaaagatttgaacagacactaactacacygaggaagaaatactatagcaaataattgta

SEQ ID NO: 1609 - DNA, 61 bp, Homo Sapiens
gcaattccctgctacaagtctcactctctcsaaaacttaaagaaattgaaggttagaaaac

SEQ ID NO: 1610 - DNA, 61 bp, Homo Sapiens
tatttggctcaaaattcatggtcactttaaytacggccacatctcgggacctacaaacaaa

SEQ ID NO: 1611 - DNA, 61 bp, Homo Sapiens
caagcaggtgaaatattgatacgtgttcttycagaattttcccagatgtgtcttggtgact

SEQ ID NO: 1612 - DNA, 61 bp, Homo Sapiens
ttttttaagctctgcaagtgaataccacatktcaattgctgccaatgagacagtccctgaa

SEQ ID NO: 1613 - DNA, 61 bp, Homo Sapiens
atgtaaaacaattccctgaacttacagatayggaaaccggaatctagataagatcagtgac

SEQ ID NO: 1614 - DNA, 61 bp, Homo Sapiens
ctaatcttccctctaggtaaagaaattgagrtgttactgttaaaggcaaatacagggcttg

SEQ ID NO: 1615 - DNA, 61 bp, Homo Sapiens
aatttcaggtttgaaaactcaaaccaacagraagatatcacacctttgtatgtgcttcttt

SEQ ID NO: 1616 - DNA, 61 bp, Homo Sapiens
aactaaggacctgtgacactcataactatgwttacatttggctttagcatatttcaggtaa

SEQ ID NO: 1617 - DNA, 61 bp, Homo Sapiens
attttcttggaatagcctcttggtgatgtcmtagcctcttcttatgagggtgagttgtcag

SEQ ID NO: 1618 - DNA, 61 bp, Homo Sapiens
acacatcaacattattttgaatattcaacaytggatagccaaataaatagcataatttatc

SEQ ID NO: 1619 - DNA, 61 bp, Homo Sapiens
tcatatactcaaatcttgatttgattatccrttggaattacccaaaaagcattattgcttc

SEQ ID NO: 1620 - DNA, 61 bp, Homo Sapiens
gagcaacccaaatatttctgatgtaaatggrtggtacagagagatcttacttcaagaaatg

SEQ ID NO: 1621 - DNA, 61 bp, Homo Sapiens
agtatttctcaagcacttttaagcaaaggtragtattcatacaagaaatttagggggaaaa

SEQ ID NO: 1622 - DNA, 61 bp, Homo Sapiens
gctagtgggtcactgggggtaattatgagtsgtaacagtcccatttctatccaatgattcc

SEQ ID NO: 1623 - DNA, 61 bp, Homo Sapiens
tattagctagctcttttgtatatattctttkgaactcttacactgacttttcaagatagtt

SEQ ID NO: 1624 - DNA, 61 bp, Homo Sapiens
gatcagaagacctgagagacataatggagtktcaattctaatttgctgttggctccttgaa

SEQ ID NO: 1625 - DNA, 61 bp, Homo Sapiens
gcaagttatggtgttcttcaatgattatgcyttggtgtgatttgcttggatgtgtctttag

SEQ ID NO: 1626 - DNA, 61 bp, Homo Sapiens
ttacagtatgtagggcgcaaacagaggaaayggcaaggaataagactatgtgagaaagcaa

SEQ ID NO: 1627 - DNA, 61 bp, Homo Sapiens
catggataataattgacatataccttggagrccatttggaatctccataaacgaaagaaga

SEQ ID NO: 1628 - DNA, 61 bp, Homo Sapiens
tctgtttctagtctacattgataattgagcrgattcttttgaatgtttgagatggggcttt

SEQ ID NO: 1629 - DNA, 61 bp, Homo Sapiens
cattgtaggccagtccattagctttgtggtycaggtacaaactttgcagttttagtgaaac

SEQ ID NO: 1630 - DNA, 61 bp, Homo Sapiens
aatacccagaacctggaacaatgcctggtawatagaagctattcaaaaaacatttgtttaa

SEQ ID NO: 1631 - DNA, 61 bp, Homo Sapiens
gttttatttctggcttttgcggatcattttktatgctgttcctctcacctgaagctccctt

SEQ ID NO: 1632 - DNA, 61 bp, Homo Sapiens
tggtagaaatatttcttgaatagctaaaatrtccttaactgtgaggcaccaacacatttta

SEQ ID NO: 1633 - DNA, 61 bp, Homo Sapiens
caatgcatagttgtttcccttgattcctcaratgtttgccatttaacctgctgactgcaat

SEQ ID NO: 1634 - DNA, 61 bp, Homo Sapiens
agaagcaattattaatgcaacgtaagctggsagggtcgactgtaaacagccatggtatggt

SEQ ID NO: 1635 - DNA, 61 bp, Homo Sapiens
cacacacacacatatatatatgtagttaatytgaatatcactatgatttgatgaaacaaga

SEQ ID NO: 1636 - DNA, 61 bp, Homo Sapiens
gagtaataattataattactgcctagttcayttccgtctttgtgtggccaagattactgaa

SEQ ID NO: 1637 - DNA, 61 bp, Homo Sapiens
tcgctgaacgaatgatctcaaccccacgtgwctctctagcttcatctcttgcctaacagca

SEQ ID NO: 1638 - DNA, 61 bp, Homo Sapiens
gataggcgctttcttttatgcacatttgaaraccctatggcaggttgaattgtgtgcccca

SEQ ID NO: 1639 - DNA, 61 bp, Homo Sapiens
gttccactaaatcagtactacatttgtcacygctattagagtccagcaagtcacttctgcc

SEQ ID NO: 1640 - DNA, 61 bp, Homo Sapiens
caaagttcttccagaaaagacactctaagcrtacatttattcaaactttccttagtaccta

SEQ ID NO: 1641 - DNA, 61 bp, Homo Sapiens
tcttcccctcatccccaagatgcaacatttytagtgataccaatttgcaggtatttcatcg

SEQ ID NO: 1642 - DNA, 61 bp, Homo Sapiens
aatgtgtttcttatgttcattatgcagtttytctgaggatgcagtagttttacgttggtgt

SEQ ID NO: 1643 - DNA, 61 bp, Homo Sapiens
tctgtatgtactgaggaagaatgaggcataygatacacagaaagaaagcagcagagtacat

SEQ ID NO: 1644 - DNA, 61 bp, Homo Sapiens
ggaaatttcaagtaatgaaaagcctttattmtgggtttcaaatatggtcacctaaactaat

SEQ ID NO: 1645 - DNA, 61 bp, Homo Sapiens
catactgttggtaggaatgtaaattgatacygtctgtcttgtggatagtttggcagtattg

SEQ ID NO: 1646 - DNA, 61 bp, Homo Sapiens
cctatgcatccaaataactcacatcacacartggcttctttggatgaattaaaagtatcta

SEQ ID NO: 1647 - DNA, 61 bp, Homo Sapiens
aagttgttatcagcttaaaaagcagggaggkcattacaaattagattcatatatatgagca

SEQ ID NO: 1648 - DNA, 61 bp, Homo Sapiens
gatgactgctggcctggtttctctttcatcytcagctttgacatgggacctcctggtttaa

SEQ ID NO: 1649 - DNA, 61 bp, Homo Sapiens
aagctagatgttaataaaactactgagaacraagtattgggttaagagagaccttatttct

SEQ ID NO: 1650 - DNA, 61 bp, Homo Sapiens
caatattaagtttcctgatgtgtaataaggmgagtaggtcttatgtttaaaaatagacatt

SEQ ID NO: 1651 - DNA, 61 bp, Homo Sapiens
agaaagatatgtgctatttaagtgtcagagstaggattgtttaggccagtgattttttttt

SEQ ID NO: 1652 - DNA, 61 bp, Homo Sapiens
ggacagtgatcagctttggtgagaggagacrgctgacggagtaagtagaagaagaaagcac

SEQ ID NO: 1653 - DNA, 61 bp, Homo Sapiens
aacttgccctcagtcaccccaagtcttaaasaaaagccatgttaaccactaacgatggcag

SEQ ID NO: 1654 - DNA, 61 bp, Homo Sapiens
tgccccagaagcaaagttttatgcattgatyagacattcactctccctaaggcagtgcagg

SEQ ID NO: 1655 - DNA, 61 bp, Homo Sapiens
tgaaaaaattggtgcgttataattataactrtggcactcatctgtcccacctcattgttgt

SEQ ID NO: 1656 - DNA, 61 bp, Homo Sapiens
ctccagctccttctgatattctttctaataygactttgtacctcttaaggaagacattcat

SEQ ID NO: 1657 - DNA, 61 bp, Homo Sapiens
gaaacccaaagtgtttgctgtaatgaccagmgagtgtcagtgaaactccttagcctaagga

SEQ ID NO: 1658 - DNA, 61 bp, Homo Sapiens
gttcagcacaggacacttatcacaccatttrttgaccctccacttccccctctgccactta

SEQ ID NO: 1659 - DNA, 61 bp, Homo Sapiens
tattaacgcagatcgagttgggaacgcacgstccatttcgacactcatcaatgtcagtgca

SEQ ID NO: 1660 - DNA, 61 bp, Homo Sapiens
cctgtcctaaaaccttgcttgtgtcatcatscaggctgtgaagtctaagacaggtccaggg

SEQ ID NO: 1661 - DNA, 61 bp, Homo Sapiens
ttatttatatatttggctccccctagtggamtgtaagcatattgacaataaaggatcatgt

SEQ ID NO: 1662 - DNA, 61 bp, Homo Sapiens
accgactcatatttacaaagttttccagtgyttatatgaagctatatgtctacatgtaagt

SEQ ID NO: 1663 - DNA, 61 bp, Homo Sapiens
aagaccaatttgccactgttcataaggatargcacattcggctgtaaatgaaatagaaaat

SEQ ID NO: 1664 - DNA, 61 bp, Homo Sapiens
cagctagacatcattttaaaaaacatcccaytgactacaaatggatgaaggaaggataata

SEQ ID NO: 1665 - DNA, 61 bp, Homo Sapiens
taagtcctcccattttgctgcatattggaakaactggattttaaagatcttttccatcacc

SEQ ID NO: 1666 - DNA, 61 bp, Homo Sapiens
gtacctcctttacagtatttacaacaataaytttgatagccaacaacattgagtaatttct

SEQ ID NO: 1667 - DNA, 61 bp, Homo Sapiens
gtatactgaaaataacgaatacctcaaggcrtgacacataatttaataatcattacttcag

SEQ ID NO: 1668 - DNA, 61 bp, Homo Sapiens
gtttagccaccaaattacccacacctactgrcagtaccaagaagccctgggatatggatga

SEQ ID NO: 1669 - DNA, 61 bp, Homo Sapiens
tctctctctgtgactgattctgccccttttytggctgttccactttcaaattcctcatgga

SEQ ID NO: 1670 - DNA, 61 bp, Homo Sapiens
tcttgattgcttctccagaaacttgaccatmggttttgttttggaaatcttggagaatctc

SEQ ID NO: 1671 - DNA, 61 bp, Homo Sapiens
agtttgatgaatgagaaatatgtaccaattwtccagtttacaatatttaccaagatttata

SEQ ID NO: 1672 - DNA, 61 bp, Homo Sapiens
atagggcagtcaagtgactttagtaacttgmggtgatatttgttaagattagatttaaaaa

SEQ ID NO: 1673 - DNA, 61 bp, Homo Sapiens
aaatcatgcagttagtgtgtagcagaagcargtaatccctacagcccacacagaatttcca

SEQ ID NO: 1674 - DNA, 61 bp, Homo Sapiens
atgccaaaaatccagccatggcttctctttsaaaattaacagtgaatatcttatccctagg

SEQ ID NO: 1675 - DNA, 61 bp, Homo Sapiens
gattacaagtgcagatatgtggggacaaagytcgaggccaaattcacaactgcactcacaa

SEQ ID NO: 1676 - DNA, 61 bp, Homo Sapiens
tatatgtattgttaaaacattttgcatatgrgttgttaaaaaaatttcatgggaaaattta

SEQ ID NO: 1677 - DNA, 61 bp, Homo Sapiens
taatcattagctttggaaagtgagatcttcmtggtaaatgtaaggactacactattcactt

SEQ ID NO: 1678 - DNA, 61 bp, Homo Sapiens
tctggatcatattgactctttggagggtttycagttgtatttaaaaatataaatttcacct

SEQ ID NO: 1679 - DNA, 61 bp, Homo Sapiens
accttcccctttcaagtgaagccttgggacmgttgcctaaatgttgaggccactcttctga

SEQ ID NO: 1680 - DNA, 61 bp, Homo Sapiens
gtaattaccatttacatgaaatctatgtgaytggtgctcctggagctgtctctccaatgag

SEQ ID NO: 1681 - DNA, 61 bp, Homo Sapiens
tctggtcctggactttcttcatggtaagttytgcaattactaattcaatctatttaattgt

SEQ ID NO: 1682 - DNA, 61 bp, Homo Sapiens
acccacctcaaagagtagttgtgaggattcrctgaaataatgtatgtaatatacttagcgc

SEQ ID NO: 1683 - DNA, 61 bp, Homo Sapiens
tttactcatcattttaaaagtttcgtatgtsttcatatgtattatgtatgtttccatttca

SEQ ID NO: 1684 - DNA, 61 bp, Homo Sapiens
tctgggtggagatttgtgaaacagcctccaytgaggttattgacaagaaatattgcttgta

SEQ ID NO: 1685 - DNA, 61 bp, Homo Sapiens
taccatattttagcactgtttttacgtgtcytgccaaattgtataccacgtaattataaat

SEQ ID NO: 1686 - DNA, 61 bp, Homo Sapiens
ccagaactggataaggcattctctgtgtcartcctcagtgtttccagtggttctttgggag

SEQ ID NO: 1687 - DNA, 61 bp, Homo Sapiens
tttgcctgagaactattcaattcgaatcttyctagtgtgctttcagaggaacaggaatgtg

SEQ ID NO: 1688 - DNA, 61 bp, Homo Sapiens
atcgaattgcaaatattattattcctgccartgatgatccttatggtacagtagcctttgc

SEQ ID NO: 1689 - DNA, 61 bp, Homo Sapiens
gtgatgcctttggagtgtttgtgatctacartattagtcccaatacttccgaagatggctt

SEQ ID NO: 1690 - DNA, 61 bp, Homo Sapiens
ctgtgaaggagatcaccagggcttggctagrtcacagctctgtggctgcatctaggtgggg

SEQ ID NO: 1691 - DNA, 61 bp, Homo Sapiens
tgatgttattgttaaggttactatgttctgytcatgttcatttggggcagagagagatatt

SEQ ID NO: 1692 - DNA, 61 bp, Homo Sapiens
ggctctgtcaagcctgtaactgtgcctttcmttgtactataggtaatgtagaccatgaaat

SEQ ID NO: 1693 - DNA, 61 bp, Homo Sapiens
ttgtgagactatagggatcagtggggactgmaaaagaactggagaactcacactcctccta

SEQ ID NO: 1694 - DNA, 61 bp, Homo Sapiens
ctgctccagctcctgtgtcggaggctgtgtstcggacctccatgtgtagtatacagtcagc

SEQ ID NO: 1695 - DNA, 61 bp, Homo Sapiens
agcagatgatgaaaggtaggtgttcagagggwagatgtgctaattctgtagtaatgaaata

SEQ ID NO: 1696 - DNA, 61 bp, Homo Sapiens
ttaaaaaagaaaagtcctggccatgaaccaytaagttgattcttatgacctactaatgtac

SEQ ID NO: 1697 - DNA, 61 bp, Homo Sapiens
cccatttagttatgggaagaatactcatggygcttactgactagattttcctaaccgattg

SEQ ID NO: 1698 - DNA, 61 bp, Homo Sapiens
atatgtgagagagtgtaagtgcctgtacgtrtaacatcacttctgctgtagtcatcatcag

SEQ ID NO: 1699 - DNA, 61 bp, Homo Sapiens
ctcaagtccagcaattatttcaattcaaaamtccagcaatgggacttgtgggtatcattgt

SEQ ID NO: 1700 - DNA, 61 bp, Homo Sapiens
agaaatctgcaaactgagaaccaaagtgacrgggccaatcacattcatattgaaactgtgg

SEQ ID NO: 1701 - DNA, 61 bp, Homo Sapiens
ctttccctctgaagaagaattagccttctcstcttccaaatgtgacttttctgtttgtgga

SEQ ID NO: 1702 - DNA, 61 bp, Homo Sapiens
tagccttccacctggtggccctggactagamctccagagaattccaggttgtgcaagatgg

SEQ ID NO: 1703 - DNA, 61 bp, Homo Sapiens
aaggttttgaaattagaaagatatatgtaasgagttgtcagctcttatttcttcctccagc

SEQ ID NO: 1704 - DNA, 61 bp, Homo Sapiens
agaaattaaaactgtgcttttcttaaagccytgaaaatggaagctaaacaacttaaatgaa

SEQ ID NO: 1705 - DNA, 61 bp, Homo Sapiens
ctctcatttctcattatcccctaagtagatmtcacatttaagcttcctcagtctcactttg

SEQ ID NO: 1706 - DNA, 61 bp, Homo Sapiens
cacgaaccaggactgtggtgcaccaagtgaraaacatgatcactctaaatcagaaggtttg

SEQ ID NO: 1707 - DNA, 61 bp, Homo Sapiens
attactactatttgtatttgtagaaatgttyacttatgcactattgctcactaggaaccaa

SEQ ID NO: 1708 - DNA, 61 bp, Homo Sapiens
aaatattttgcttaggtttgtatcatttaawtacagatgggagagtggatttctaatcttc

SEQ ID NO: 1709 - DNA, 61 bp, Homo Sapiens
ataagataaagtcatatttatgggactgttyggaaacttagaggtctatatttaggaagca

SEQ ID NO: 1710 - DNA, 61 bp, Homo Sapiens
atattttgggaataattgctagcatatctgrgatgaaaaggaatttggtgtactaattcta

SEQ ID NO: 1711 - DNA, 61 bp, Homo Sapiens
atccttgtagatatattttgaaaaactagcrccaattatctgcaataatttcttgcagtcc

SEQ ID NO: 1712 - DNA, 61 bp, Homo Sapiens
ttcctaggactgcacacagccttttaagagmtaagattgagaatagcatcttactgtttct

SEQ ID NO: 1713 - DNA, 61 bp, Homo Sapiens
cagcatactgtactcagtaacagaacaatawtacacccagtaacttagtgccttatgcatt

SEQ ID NO: 1714 - DNA, 61 bp, Homo Sapiens
aatgttaacaactgtcaatttatgggtgacrggcatacagctgttattactcctttttgta

SEQ ID NO: 1715 - DNA, 61 bp, Homo Sapiens
ggtagaacctcaggttaagacacgtaaatcwcagcgccgcaggctgggaaaataatttaaa

SEQ ID NO: 1716 - DNA, 61 bp, Homo Sapiens
tctggcatgtaaggagtttagaagttgccamtctgttctaaaaaataaaaagctgatcaca

SEQ ID NO: 1717 - DNA, 61 bp, Homo Sapiens
ctaatttttaacaaagttactgacttttaaytcacagagaaaaaaatgatggtatgggagt

SEQ ID NO: 1718 - DNA, 61 bp, Homo Sapiens
cctgaaagaattgacaaaaagctccaggaamtaataagcaattatagcagggttgcaggat

SEQ ID NO: 1719 - DNA, 61 bp, Homo Sapiens
ggtccctagaatgcattaatctagagtaatkgttccagtcagccatgctgtaaatttaact

SEQ ID NO: 1720 - DNA, 61 bp, Homo Sapiens
agcacaaatgagttcttgcaagcaggttctrtcttgagtagtacatatggggaattggagg

SEQ ID NO: 1721 - DNA, 61 bp, Homo Sapiens
agcccacttctccaacagcatctctcatcamtcttccccagctactatgctcctactgttc

SEQ ID NO: 1722 - DNA, 61 bp, Homo Sapiens
cctgtggtccagggcatatttgtagtgaacraaataccaatgatagggaaaagaaccatgg

SEQ ID NO: 1723 - DNA, 61 bp, Homo Sapiens
gtgcaataattagcagttaggtcagtatccrgcacatagtgagcattcaataattagtgac

SEQ ID NO: 1724 - DNA, 61 bp, Homo Sapiens
aagaacaactagtaaattcttgactaaaatmctactgatgaagtaaaattctaactcaaaa

SEQ ID NO: 1725 - DNA, 61 bp, Homo Sapiens
tcactgcctgctgctttccagatcctcttaygtcctgaccttccaaatgccctccgcattt

SEQ ID NO: 1726 - DNA, 61 bp, Homo Sapiens
gaaggaaggataaaagttaggaagctctacwgcatttgattggttgttgtacctcgtcacc

SEQ ID NO: 1727 - DNA, 61 bp, Homo Sapiens
aataagcctcctccttctaggactggccctycttccattctccccaatgcacttgctcctc

SEQ ID NO: 1728 - DNA, 61 bp, Homo Sapiens
ttgtcttagctacttttcgatctattttgcrcatagccttggatattcttgattttagtat

SEQ ID NO: 1729 - DNA, 61 bp, Homo Sapiens
ttaagattagaggtttattctgtatggaaaratccttatttctaccccatatacatttatg

SEQ ID NO: 1730 - DNA, 61 bp, Homo Sapiens
actcaggaaatatacctagaaatcagagttwtggataccctgtgatcaagacaatcaattt

SEQ ID NO: 1731 - DNA, 61 bp, Homo Sapiens
tctgtgccttttggcttatattgttataatyggaatggaactttttattggttttcttaaa

SEQ ID NO: 1732 - DNA, 61 bp, Homo Sapiens
agctgtaaagtgctacaaatgcaaaatgtcrttgctggcaattggaagccctgcccccttc

SEQ ID NO: 1733 - DNA, 61 bp, Homo Sapiens
ttctagtagtcctgctcatggatactattcygtgcaaagggaacctagcaccaggctctga

SEQ ID NO: 1734 - DNA, 61 bp, Homo Sapiens
ccttggcatggcatttaaggttccaggctakgatttcaatctcatttcccattctagtcgt

SEQ ID NO: 1735 - DNA, 61 bp, Homo Sapiens
gagagtaggggaggtgtcaaaatggataacrtaggcaataacagccaaatatgcccgtgtt

SEQ ID NO: 1736 - DNA, 61 bp, Homo Sapiens
attttcagattgagtcatggggtttaaacasttgtctttcacaaaaccaaacagctgaacc

SEQ ID NO: 1737 - DNA, 61 bp, Homo Sapiens
agggtagaggttggcaaagtgtgactcacakgccaaatgctgcctactgcctgtttttgca

SEQ ID NO: 1738 - DNA, 61 bp, Homo Sapiens
actgaaaggaacgttcgtgtatgtgctctaracttagtgattgcatataatctgttatggt

SEQ ID NO: 1739 - DNA, 61 bp, Homo Sapiens
tcattacttgctcacttatttgctaacttgstcactcatatcatttattcactgatttatt

SEQ ID NO: 1740 - DNA, 61 bp, Homo Sapiens
ttgactgctttggcagaatgtttgaaagttygagtgtggttacctgtactttctagtggga

SEQ ID NO: 1741 - DNA, 61 bp, Homo Sapiens
cttcaaaggtgacagaatcaaaagaaagtawggactaatggcctttaaaaaaagtgtctaa

SEQ ID NO: 1742 - DNA, 61 bp, Homo Sapiens
ttgaactgagcttgttcattctgataactarttcttgtccaaagtgatgatggagttttta

SEQ ID NO: 1743 - DNA, 61 bp, Homo Sapiens
tctgattgggaatggacactatcagaatatwccgtcctgctcacagaatatattataagga

SEQ ID NO: 1744 - DNA, 61 bp, Homo Sapiens
aaaacattcagttttaccatcaatgttagcrgtaggctttacgtagattctctctactgag

SEQ ID NO: 1745 - DNA, 61 bp, Homo Sapiens
tttccaaatagggaggggtggaaatccaaasaggacatcaacagaaccaaggcttaaatta

SEQ ID NO: 1746 - DNA, 61 bp, Homo Sapiens
acaggaggtttctggtggacacatcagaggrgggagtacctaccctcacaacctcagaaag

SEQ ID NO: 1747 - DNA, 61 bp, Homo Sapiens
aattctaccgtctcactgatacatgatagtycaagagctaagatgatattgcaggactatc

SEQ ID NO: 1748 - DNA, 61 bp, Homo Sapiens
gcacaaaaagctagagatttggtcctgctayccaagatcaagagtttgagaattaaacaca

SEQ ID NO: 1749 - DNA, 61 bp, Homo Sapiens
aagtaatatatttagccaatactggttatcragagagagagagagagaaagagagagagag

SEQ ID NO: 1750 - DNA, 61 bp, Homo Sapiens
atatgtttatgaaaaagatgcccagtttcaractcttctccttactctctagctatagccc

SEQ ID NO: 1751 - DNA, 61 bp, Homo Sapiens
agttagagttcaggcacttatcagctaaatraccttgaatctgtgactagttatctacaaa

SEQ ID NO: 1752 - DNA, 61 bp, Homo Sapiens
acagtgttggatttaggttagagtgaatccraaatgagtacgaccactgatttctgggatt

SEQ ID NO: 1753 - DNA, 61 bp, Homo Sapiens
acttgaaaaagcataatctcttgttgacaaygccacagtttacttctactaggaaagttta

SEQ ID NO: 1754 - DNA, 61 bp, Homo Sapiens
agtgtcaaggacaagaaggaggtatgaagasaaaaagtccggtatctctttgcttaactgg

SEQ ID NO: 1755 - DNA, 61 bp, Homo Sapiens
ggatgctaaaatggagctagacacatttggmtcattgttaaaaatacggatttaggagcca

SEQ ID NO: 1756 - DNA, 61 bp, Homo Sapiens
ctaagttttaaaaccagcaccttgctaactsaaaacgtggtcagaacccatcagcattggc

SEQ ID NO: 1757 - DNA, 61 bp, Homo Sapiens
tcaattttctaacctaatctgcacaaatctrtgatctaatccgttcctgttagattctcta

SEQ ID NO: 1758 - DNA, 61 bp, Homo Sapiens
agttcctaaacatggtcctgggaagagatayggtgaactagcaatattattcattctaaca

SEQ ID NO: 1759 - DNA, 61 bp, Homo Sapiens
tttcttttaatctaatcttaattcttctgtscaagctaattttcctgtacacatttatttt

SEQ ID NO: 1760 - DNA, 61 bp, Homo Sapiens
aggcatatattgctatcaatcatcaattttrggcattacctacttatcttttttatggtaa

SEQ ID NO: 1761 - DNA, 61 bp, Homo Sapiens
gctgggtccttggtagggcctgaagagaggrctggcagggacagtcaggcagaagtgccag

SEQ ID NO: 1762 - DNA, 61 bp, Homo Sapiens
actgacttaaatgggagctacaaagaaacayagacagtgccaagaagtcatcttaataggt

SEQ ID NO: 1763 - DNA, 61 bp, Homo Sapiens
aaaaccctatcctctaccttacttatgctaycttacttctctatcctttgtgtaatttctg

SEQ ID NO: 1764 - DNA, 61 bp, Homo Sapiens
actttatacagaggggatttctggaaaactytgaggaaagatgtctctaggaatagaaaac

SEQ ID NO: 1765 - DNA, 61 bp, Homo Sapiens
ctattttttattgcagatagcagtagttcaytttcttttattggccttttttccccaaata

SEQ ID NO: 1766 - DNA, 61 bp, Homo Sapiens
ctaaccacttctattcaacattgcaatgaasattctagccacaacaataagcaaaataaat

SEQ ID NO: 1767 - DNA, 61 bp, Homo Sapiens
gacagttaacttacttgcagatcagcttaasttcttgaggctttttaaaagctttgtcagt

SEQ ID NO: 1768 - DNA, 61 bp, Homo Sapiens
gttaatactcattatatttttgaacctcttyatagctctccgagatgctggcaaacagtct

SEQ ID NO: 1769 - DNA, 61 bp, Homo Sapiens
ttatgagcacttttgcataatttgctaaccmtatttatgaagttgctcattgctgtagctt

SEQ ID NO: 1770 - DNA, 61 bp, Homo Sapiens
aaagctccctaaggtcatgggaaggaaatcrcctacaaattccaaagtgtgctatcccagg

SEQ ID NO: 1771 - DNA, 61 bp, Homo Sapiens
tctaaatggttctctaactgttgttcatttyttctgtgggagggaacatccagtcatctaa

SEQ ID NO: 1772 - DNA, 61 bp, Homo Sapiens
ggctagagaaggccagccctgatggccaacrtcctagcagaatataaggtgcttatccaat

SEQ ID NO: 1773 - DNA, 61 bp, Homo Sapiens
agtcttcatctgaatagactgcaccagcgtrtggctgcccaaagtaaaaaatgcatggtgg

SEQ ID NO: 1774 - DNA, 61 bp, Homo Sapiens
atagctagaatagaataggaactcagaaaaytggtgttgtcttgggcttattttctttggc

SEQ ID NO: 1775 - DNA, 61 bp, Homo Sapiens
gcctgttgaataaacatttttagcccttgaycttgttgttgttgtttcgtatttttaatga

SEQ ID NO: 1776 - DNA, 61 bp, Homo Sapiens
ccctttccctacttgctcatcatacaaacaygctgttgtttctcttgttttaaaaagaaat

SEQ ID NO: 1777 - DNA, 61 bp, Homo Sapiens
ggccttttaagtgtttttgaaatatagcctmaactaagaatggtaaaaattccatcaaggt

SEQ ID NO: 1778 - DNA, 61 bp, Homo Sapiens
tcttagtgatagacatccaggctgcctctcrcttgttgttaccacaaaggaggctgcaaag

SEQ ID NO: 1779 - DNA, 61 bp, Homo Sapiens
tatctgcctccaaggtacagggagactgtawgctctgggtgacagttatttgagtgtgata

SEQ ID NO: 1780 - DNA, 61 bp, Homo Sapiens
taagaacttgcctgctaaatactgcaatgcrcaatgccaggatagctcataaatgggaagt

SEQ ID NO: 1781 - DNA, 61 bp, Homo Sapiens
gtttacctctaatttgttcattttattgctsactacactatgtatttgaccactcccctcc

SEQ ID NO: 1782 - DNA, 61 bp, Homo Sapiens
aataagacaagtggtaaatcactgggtaacraccataaaaaggatcgacaaaaagctgcag

SEQ ID NO: 1783 - DNA, 61 bp, Homo Sapiens
atccagagatacttctcactgttctacgaartcttggctctgctgggttctctgtggaagt

SEQ ID NO: 1784 - DNA, 61 bp, Homo Sapiens
atggcatctgtgattgagctcccggcatacygtcctgctctctgacaactattcctgtctt

SEQ ID NO: 1785 - DNA, 61 bp, Homo Sapiens
agtccactatgaaaccacgacatccaagagsccaaagtcgtcttctctgccttcaagtcat

SEQ ID NO: 1786 - DNA, 61 bp, Homo Sapiens
gaagccatggtgttcccttaaaacctgatayggagggtgattccccatcatgtctgtattc

SEQ ID NO: 1787 - DNA, 61 bp, Homo Sapiens
aagcatattgactgcccttaactcaagcccytaactctctaatttcactgatttctataat

SEQ ID NO: 1788 - DNA, 61 bp, Homo Sapiens
tcacttcaaacccaattttgacatggatacrtagatcgatgcaaatgtatcaattatctgc

SEQ ID NO: 1789 - DNA, 61 bp, Homo Sapiens
aaggattgacaaatgatgatctttctgtccrcaaggttcttatttcctgtgcaaaatggac

SEQ ID NO: 1790 - DNA, 61 bp, Homo Sapiens
gctgcttccaaagctactctaatcaccataktctattattcctacaaaagcctagtttacc

SEQ ID NO: 1791 - DNA, 61 bp, Homo Sapiens
aatccagtgagaatgaaggggaaaaagtaarcgttcatcttcttcaaaatccagtgtcatc

SEQ ID NO: 1792 - DNA, 61 bp, Homo Sapiens
ttcccggttagctttgccaaactggttggartggtctcaatctctagaagagtggttctca

SEQ ID NO: 1793 - DNA, 61 bp, Homo Sapiens
tcccagatcttctaattcacttggtccaacsagggcacaagagtctacatttctaacgagt

SEQ ID NO: 1794 - DNA, 61 bp, Homo Sapiens
gcgcgtgtgccacccccgctgcattgagcaygggacctgtaaagatggcaaatgtgaatgc

SEQ ID NO: 1795 - DNA, 61 bp, Homo Sapiens
tgagtgacctgcccaggtgccacaagtcagwacagttttcttttccctgtatcgcactggg

SEQ ID NO: 1796 - DNA, 61 bp, Homo Sapiens
cgggacaggctcagcctaaaaaggcttcctyctaccctacctccaggtgatgtggttatga

SEQ ID NO: 1797 - DNA, 61 bp, Homo Sapiens
acagtgttatatgtcaatcagaacttcccckttaatctgaaatgactgcatcctcactata

SEQ ID NO: 1798 - DNA, 61 bp, Homo Sapiens
tggagtcatctattatgacatcaaccagatyatcaccactgccgtgatgaccctcagcaaa

SEQ ID NO: 1799 - DNA, 61 bp, Homo Sapiens
tgtcaggttcactagaggtgaatgcaagggyttagagaggtgaggttgcagagggaaaagg

SEQ ID NO: 1800 - DNA, 61 bp, Homo Sapiens
acaactggccccatttcataacagaatcagmtggcccaggagggacccccaagagtgtttg

SEQ ID NO: 1801 - DNA, 61 bp, Homo Sapiens
ggttgtgtgccaggtgctgtgttgagtcttstccgtgcatgaatgaatgcaagaacctggg

SEQ ID NO: 1802 - DNA, 61 bp, Homo Sapiens
ctctctgggcctcagttcccatcatgttagrattgtctgaggattaaatgaaactgtcact

SEQ ID NO: 1803 - DNA, 61 bp, Homo Sapiens
agtacaattggaatgtttgtaccacaaggamatgatgaatgcttgaggttatggagacccc

SEQ ID NO: 1804 - DNA, 61 bp, Homo Sapiens
caacaaatgattctgtctatgctgaagtgayaaggataggaaaactgtgcctgcataggaa

SEQ ID NO: 1805 - DNA, 61 bp, Homo Sapiens
cctgtgttccctccaggaatgacttcatttkggaggattatgttttttttttttttaattt

SEQ ID NO: 1806 - DNA, 61 bp, Homo Sapiens
ccccgggaaagcttctggaacaacactttasgggctactgacaggctgctctgcttctcac

SEQ ID NO: 1807 - DNA, 61 bp, Homo Sapiens
ccaaatgagcaatcccaaactgcaagtgccrtaagtgggcctgtgaggtcacaccgcccgg

SEQ ID NO: 1808 - DNA, 61 bp, Homo Sapiens
gaatgtgactagcatggggacaggaagatcygtggcttgattggttccaggtggcatccat

SEQ ID NO: 1809 - DNA, 61 bp, Homo Sapiens
ttgtattcagcacttaccagaggctcaacaygccctgaatcagaccacagaaatcagacca

SEQ ID NO: 1810 - DNA, 61 bp, Homo Sapiens
taattcattgactcccataaacgcagttagyaaaaggaagagctagatttcaagcccaggc

SEQ ID NO: 1811 - DNA, 61 bp, Homo Sapiens
tttcttgctcttgtctgagaacattagctcyttctagtctagaaccactattccatcaaca

SEQ ID NO: 1812 - DNA, 61 bp, Homo Sapiens
tccagcataagtgaaaaaacagtgtttcggrtacgctagtgtttctgagacaaaatatgta

SEQ ID NO: 1813 - DNA, 61 bp, Homo Sapiens
tggaagtgttcaaactaggatggataacttyatgttagagatatcatgcagaaggcgagag

SEQ ID NO: 1814 - DNA, 61 bp, Homo Sapiens
acccctttctgtttatcctactctttctgtsaagattgatagacatgttatgatccagcac

SEQ ID NO: 1815 - DNA, 61 bp, Homo Sapiens
ggatatcagaagtcaaatagcgttcatcackatgctggcatctggaaccagtgccaataaa

SEQ ID NO: 1816 - DNA, 61 bp, Homo Sapiens
gccaaaaggccaagaagcaattttttaatasgtgaatctgagaagagtacatatgtattct

SEQ ID NO: 1817 - DNA, 61 bp, Homo Sapiens
atctactgttccctctgctgctgctgctccyaactcgactctagagtgccttactcgtgtg

SEQ ID NO: 1818 - DNA, 61 bp, Homo Sapiens
ttcatcaccccaatttgtttacttcataacrtcatcactcttcttcccccaggagagtgtg

SEQ ID NO: 1819 - DNA, 61 bp, Homo Sapiens
cccagccatgctgtcacccctaaccacatastagagttagacaggtcctgctacatgttaa

SEQ ID NO: 1820 - DNA, 61 bp, Homo Sapiens
caaaggacatgaactgatatctttattctaytgaacttccggggcagcatttagcactgtg

SEQ ID NO: 1821 - DNA, 61 bp, Homo Sapiens
gaggacatctgcctctctagactataaactstttggggctaggtcttctttgtctttatat

SEQ ID NO: 1822 - DNA, 61 bp, Homo Sapiens
aaagtcacacggccaggatttgaatccaagyctgtttaattccagaatctgggcccttaaa

SEQ ID NO: 1823 - DNA, 61 bp, Homo Sapiens
agcagcctactgagcagttgtttctacaagyatcataatgagctaacagcaaacctctggc

SEQ ID NO: 1824 - DNA, 61 bp, Homo Sapiens
ctctgtggcattctggctccagaagtcagaygttcaacgctgcatgaataacctatgcctt

SEQ ID NO: 1825 - DNA, 61 bp, Homo Sapiens
ccaggcttcgtggctaagtcctccagcttcrgtgcatccatttttccacccctgtcctcag

SEQ ID NO: 1826 - DNA, 61 bp, Homo Sapiens
aatccccttccctcactgactttatatttckggaaatttcatgtctagggaagttgaagga

SEQ ID NO: 1827 - DNA, 61 bp, Homo Sapiens
taggaaacatctcaaaactgcacagaagaayccatcaaaaaattttatgtaacagtgaaaa

SEQ ID NO: 1828 - DNA, 61 bp, Homo Sapiens
aagaacctgaaataaatcaactgcattcatygtaagaataccacctctgaggaaaaaaaat

SEQ ID NO: 1829 - DNA, 61 bp, Homo Sapiens
tcggcttatggaaaataattatccctttccsttatgagaccagcccctgagccgactaggg

SEQ ID NO: 1830 - DNA, 61 bp, Homo Sapiens
tgaaaaggaaaaaaagaggatgcacatcgtraatatgtatcgtcttggtggagttcaaatt

SEQ ID NO: 1831 - DNA, 61 bp, Homo Sapiens
tgcctgggctggttgcgaactcctggtggcytcaattgatctttgcacttcagcctcccaa

SEQ ID NO: 1832 - DNA, 61 bp, Homo Sapiens
cagccaacctgtggtgttttttctaaagagygttgctggcctcattggcaaggaacacata

SEQ ID NO: 1833 - DNA, 61 bp, Homo Sapiens
gtcaaaatatgggatacaatccgacgttgcmcaagattctactggatactctcagttaaca

SEQ ID NO: 1834 - DNA, 61 bp, Homo Sapiens
cataggcaaaaattggggtttgacttatacrttgacagtttgcattgcttggattactaat

SEQ ID NO: 1835 - DNA, 61 bp, Homo Sapiens
ggaacttgtattagcagctttgaggatgacragaaacagaatttaagtgctacactagaat

SEQ ID NO: 1836 - DNA, 61 bp, Homo Sapiens
aaagcatcgtgttgtacacaaattttgtcartcataactcaataatgctggaaaaataaaa

SEQ ID NO: 1837 - DNA, 61 bp, Homo Sapiens
ccccagaatcagtgctatttgaaaatcccaygtaggtaagaggacagggaggcatacaaag

SEQ ID NO: 1838 - DNA, 61 bp, Homo Sapiens
ctttttgaccaaatagattttgctcacgaayatttttttaatgtaaatttcccagtaggaa

SEQ ID NO: 1839 - DNA, 61 bp, Homo Sapiens
agtgtgttctaaataacatctcacactgagracaacattctgcttattccacttcagacta

SEQ ID NO: 1840 - DNA, 61 bp, Homo Sapiens
tgcattataaaaggtataatatttgttaaayacaattttagctgcatcattttcttactcc

SEQ ID NO: 1841 - DNA, 61 bp, Homo Sapiens
aataaaatactgtctccactaatgtctcgcstagaaatgaaataattggatctatcttgtt

SEQ ID NO: 1842 - DNA, 61 bp, Homo Sapiens
gcatgtgccctcttagccggattcaaaccastgttgcctacattttcgtggccatagcagg

SEQ ID NO: 1843 - DNA, 61 bp, Homo Sapiens
aatgtgcaaatagcaagaaatgccctgaaawcaaaagcttgcctttaacaccagggtggca

SEQ ID NO: 1844 - DNA, 61 bp, Homo Sapiens
tccattataccattagtcagatttgaataaygaggttttgaaaggataaaaccttttctcc

SEQ ID NO: 1845 - DNA, 61 bp, Homo Sapiens
actgacataagggaagacaatgatcctaaayctcagttacttagaaaactaaaatatgatc

SEQ ID NO: 1846 - DNA, 61 bp, Homo Sapiens
gttctctgggaaggctttggaagacttttayaccagtaagtaacatgatcatatgtacatt

SEQ ID NO: 1847 - DNA, 61 bp, Homo Sapiens
gattaatataggggactggaagattccacaracgttggaaggctagggaagcaaaagtcag

SEQ ID NO: 1848 - DNA, 61 bp, Homo Sapiens
tgctcccagccaattctttctctaaatccayttcttcccattcctattctaatcttctcat

SEQ ID NO: 1849 - DNA, 61 bp, Homo Sapiens
gcaggacagggcagattatgtgaggttcagragtggacataatacacagagagatgctgca

SEQ ID NO: 1850 - DNA, 61 bp, Homo Sapiens
tggccgagcagatgtgcaggactgggctaargagcagacattcacccacctctgagcaaac

SEQ ID NO: 1851 - DNA, 61 bp, Homo Sapiens
ttttgtgacttgaagcccagttaggagaatkatgagagatggtgtgaggacagctcctgcc

SEQ ID NO: 1852 - DNA, 61 bp, Homo Sapiens
agttagccacctgggatccatcttgaagaaytggcttgaaggattcacatttgttcactat

SEQ ID NO: 1853 - DNA, 61 bp, Homo Sapiens
tactcaacatgtaaaggcagagtaggaatgrgaaagactagggaaataagaagatcagaaa

SEQ ID NO: 1854 - DNA, 61 bp, Homo Sapiens
ttaagtcgcttccagtctgggctatttccaytggtagttttacgtttttctggtcacataa

SEQ ID NO: 1855 - DNA, 61 bp, Homo Sapiens
ggtaaaagaatacccctgagaaatttaatcwtcagccagcccttcctttgatttgcagcct

SEQ ID NO: 1856 - DNA, 61 bp, Homo Sapiens
attcacttccctatgatactgagtttaggcwgcaaatcaaaggaagggctggctgatgatt

SEQ ID NO: 1857 - DNA, 61 bp, Homo Sapiens
aattcacactaaaaatgactagatgaaagaygtggtactagaggctttgtatatgcctaga

SEQ ID NO: 1858 - DNA, 61 bp, Homo Sapiens
acattttatattttatttgctcttcaaattrgactgttagctgtgttctgccaggatacct

SEQ ID NO: 1859 - DNA, 61 bp, Homo Sapiens
cctctttttgattctttgaacataccaggcrctctccaaccagctccaggggtgttccctc

SEQ ID NO: 1860 - DNA, 61 bp, Homo Sapiens
gaggcatctctgttttaacaagtccagtagkaagctcttgaccaccctaccttacaaacct

SEQ ID NO: 1861 - DNA, 61 bp, Homo Sapiens
gatttgacatcatgttacatgacctatcacrgacatttgaagtacctactgacttcctctt

SEQ ID NO: 1862 - DNA, 61 bp, Homo Sapiens
tagcacaaaacaatgcaggttgacccagctwtgtcatttggtaaaatatctcccaggcaat

SEQ ID NO: 1863 - DNA, 61 bp, Homo Sapiens
atgttttgagaactattttatcaaggatatygtcaagcacacagtaggacaagactctctc

SEQ ID NO: 1864 - DNA, 61 bp, Homo Sapiens
tgtggtattatttcaaaaaatctataactcyggtgtaattatgaaaaaaaagcaaatgatc

SEQ ID NO: 1865 - DNA, 61 bp, Homo Sapiens
cttcacattcattcttctcacaatacaagcyttccagttctatcttctctgtccttgattt

SEQ ID NO: 1866 - DNA, 61 bp, Homo Sapiens
ttctgtattggctgttgacaactatcactayaacccatctcaattcaacatgagttctctt

SEQ ID NO: 1867 - DNA, 61 bp, Homo Sapiens
aaacaaatgtgcataacagatgggactattsacttacagcccagggaattttattgacgct

SEQ ID NO: 1868 - DNA, 61 bp, Homo Sapiens
tctgcctgggaagccttcccctgataccccyagttggcaggagtcttcatttgttcttttc

SEQ ID NO: 1869 - DNA, 61 bp, Homo Sapiens
aagcttatatgccaccttgaagttgaagaartaacaggggcttgatccttgcaaaataggt

SEQ ID NO: 1870 - DNA, 61 bp, Homo Sapiens
cagtggatgattcctttccttaacacatgcrcagttcaggaaattaatcaatatggagtag

SEQ ID NO: 1871 - DNA, 61 bp, Homo Sapiens
gcacagagtggccaatattagaagcagagakggggtgcagatgagacttcaggaatatgtt

SEQ ID NO: 1872 - DNA, 61 bp, Homo Sapiens
agccttctcatgctctcttttacctaccacwtctgactgatagccaggccctgctatttat

SEQ ID NO: 1873 - DNA, 61 bp, Homo Sapiens
ttagcaacttgcacaaccattgcactatgckcattgattctgtgagtcggaatctggaata

SEQ ID NO: 1874 - DNA, 61 bp, Homo Sapiens
ctgcagaaaaggggagctcatttagttcatragcggtcgagtgaagattgaaaattaacct

SEQ ID NO: 1875 - DNA, 61 bp, Homo Sapiens
gcaggcgggaacactgtgggccctcaagttsaatggaaatataaagggcagatctattgag

SEQ ID NO: 1876 - DNA, 61 bp, Homo Sapiens
ttttcacaaggacattttgtgctggattaakgacactggtttgtctagagatttttgggtc

SEQ ID NO: 1877 - DNA, 61 bp, Homo Sapiens
cctgtcctcctcccaactcctcctgcaaagmctttctttaccactgttttctacacatgga

SEQ ID NO: 1878 - DNA, 61 bp, Homo Sapiens
caggaggccagtttggatctgaaggtggtargtaagaattctagatagatattttgtattc

SEQ ID NO: 1879 - DNA, 61 bp, Homo Sapiens
gatttctaatttgattccattgtagtcagakaaaagtttgtataatttaaattcttttaaa

SEQ ID NO: 1880 - DNA, 61 bp, Homo Sapiens
cataatagaatcaggcccatccaggttactsccccaatatctaaaaggaaccctgtcactt

SEQ ID NO: 1881 - DNA, 61 bp, Homo Sapiens
gaacggaagagggagagaggccagccctatktaccagctgctcccacatgagtgggacttg

SEQ ID NO: 1882 - DNA, 61 bp, Homo Sapiens
tgcattgcttctttcctacctctgtgtactygtgcagttggttcatagtaaatgcttctgg

SEQ ID NO: 1883 - DNA, 61 bp, Homo Sapiens
cagtgccttaagggcccccaaagtccatgtygaggaggagttgggggctcatgctgaatgt

SEQ ID NO: 1884 - DNA, 61 bp, Homo Sapiens
aagccatgagaaggtgaaggcctcagtgacrgtattctagttgagtactgagtgcacggaa

SEQ ID NO: 1885 - DNA, 61 bp, Homo Sapiens
tcagccttgtgtgtgttgctgagaagggttmgagagatcgagaatctaagacaggaaaggg

SEQ ID NO: 1886 - DNA, 61 bp, Homo Sapiens
acagaagagcaccagaggctttacaaagacmcgtgctgcaacaagttaagaaattttagtg

SEQ ID NO: 1887 - DNA, 61 bp, Homo Sapiens
tcagcagcttttccctttaggtaatattctrattgtactcagtcacatgtgaggtgtgtcc

SEQ ID NO: 1888 - DNA, 61 bp, Homo Sapiens
tgtttttgcaaactttcagtcatataaaaamcgtaaatttcacttttcccccattttcttg

SEQ ID NO: 1889 - DNA, 61 bp, Homo Sapiens
ttgagattacaatcctgaagttatcacttayactttactctgagctagatggggttccaaa

SEQ ID NO: 1890 - DNA, 61 bp, Homo Sapiens
tgggccatacactaatttacagaacctctcycctactgacaggcatccagatgattccttg

SEQ ID NO: 1891 - DNA, 61 bp, Homo Sapiens
agaatttgaaccacatctccaactctattgmctatcattcttaaaataccccatgcagtct

SEQ ID NO: 1892 - DNA, 61 bp, Homo Sapiens
aagaaaaaccaaattaagtgtcacataaackttgtaattaatgtaaccattgactcactga

SEQ ID NO: 1893 - DNA, 61 bp, Homo Sapiens
ttctaggcttaagatacccattactgtgtcrtaagccaaatatctgatacttatgtccaaa

SEQ ID NO: 1894 - DNA, 61 bp, Homo Sapiens
aggtgatgtgataccgcaccctgtagatatytatgcctgtcaagtattcataagcactctt

SEQ ID NO: 1895 - DNA, 61 bp, Homo Sapiens
tggaactttgctcatgtctgcgtcagtggarcctagacctggaatctcaattgtgtgattt

SEQ ID NO: 1896 - DNA, 61 bp, Homo Sapiens
tctacatctaggctctattctgtcctattgratgtactgtttatccctttgccaataatat

SEQ ID NO: 1897 - DNA, 61 bp, Homo Sapiens
cctctgagccccgtggaattatgtacagtakgcttgtgagtatattgtggtggtagtggta

SEQ ID NO: 1898 - DNA, 61 bp, Homo Sapiens
attcaagttgccatggcaaattacgatagartggttggctactaaactacagaaatttatt

SEQ ID NO: 1899 - DNA, 61 bp, Homo Sapiens
gttgaaatatcaatagcttgattttagacamgataaatctgaggtgcctattagacatcat

SEQ ID NO: 1900 - DNA, 61 bp, Homo Sapiens
aaataaattcacaatgggaagcagaccacgraagagtggtatctgaataaaagatcttgta

SEQ ID NO: 1901 - DNA, 61 bp, Homo Sapiens
gttacagttttcagccatctgttgtttggasctaaagtgaaagcaataacaggacttaatg

SEQ ID NO: 1902 - DNA, 61 bp, Homo Sapiens
gaaaattatttcccaggatagcatcatcccwggaagtctctggagcgcactttatttttaa

SEQ ID NO: 1903 - DNA, 61 bp, Homo Sapiens
cagcaaatatgggtgtgtattggctgctacraaggaagtgtatgcctgaactatttgctaa

SEQ ID NO: 1904 - DNA, 61 bp, Homo Sapiens
gcttccagttcttccactatagcagcgaacrcaggcccgtattactaaagcagcatatcat

SEQ ID NO: 1905 - DNA, 61 bp, Homo Sapiens
acttgatgggaaatgttcttagcttcaaatrtaaatgggtcctccctttagctaaattcct

SEQ ID NO: 1906 - DNA, 61 bp, Homo Sapiens
gaaggataaacaattctccctcttaactacygaaaaggagacatatgacttggggcattag

SEQ ID NO: 1907 - DNA, 61 bp, Homo Sapiens
ttctactttgttttagaaaatgaaatggccraatgaggatagagagaaaattaggaacatc

SEQ ID NO: 1908 - DNA, 61 bp, Homo Sapiens
gcaagaagctaaaataaagtgaggtgataakttagcacagtgcattcttatgtacttttag

SEQ ID NO: 1909 - DNA, 61 bp, Homo Sapiens
gatttttacttttagctatgagtttactttygtagaagtaggcataatattaaatcagaga

SEQ ID NO: 1910 - DNA, 61 bp, Homo Sapiens
gggactcatgaaaagtgttgagtagtacaargagttggactttgaggaaggaaattgatca

SEQ ID NO: 1911 - DNA, 61 bp, Homo Sapiens
ctttcttttggataaaggaattagatcatgrcccatttctaatatgaatctaatactttta

SEQ ID NO: 1912 - DNA, 61 bp, Homo Sapiens
tggattaagcggtctctgactttgtagcacrcaagtagccatagacaacatgtaaatgaat

SEQ ID NO: 1913 - DNA, 61 bp, Homo Sapiens
aactccgaagtaaatcaagggtaatgaccaygcaacaggttttttctggtctttcacaaca

SEQ ID NO: 1914 - DNA, 61 bp, Homo Sapiens
tgtgcctatagcctcagtccttaaccactayaccacatgccttcagtatgtttaaaatgct

SEQ ID NO: 1915 - DNA, 61 bp, Homo Sapiens
ttcagcaaaatgttagctaacataactttgwtttttccattcgctgagctattgaaagtat

SEQ ID NO: 1916 - DNA, 61 bp, Homo Sapiens
gtatttatttctttaacatggcttatgtagmtaatactcctcattgactaggaacacacaa

SEQ ID NO: 1917 - DNA, 61 bp, Homo Sapiens
aatgcatcagttatttatagtttttaaacarttgactgaattttaccctattaaatcatcc

SEQ ID NO: 1918 - DNA, 61 bp, Homo Sapiens
gctgtgcagatgattctaatatgcagccacrgtagaggatcgttggactaagtaacctctg

SEQ ID NO: 1919 - DNA, 61 bp, Homo Sapiens
cagagcaagaaggcacagcacacaactgagyagctgcctcctcacatctgctgcagaagtt

SEQ ID NO: 1920 - DNA, 61 bp, Homo Sapiens
agctggagtgaggggcaggtggcgccggtgycaaggccagcagtgtctgacctccagagcc

SEQ ID NO: 1921 - DNA, 61 bp, Homo Sapiens
actctgtcaccaccttccctcttgcttagarcattccagtagccatttaacttttctcttc

SEQ ID NO: 1922 - DNA, 61 bp, Homo Sapiens
actggtgggcaagagggcccatcctgttacyctggcctcccttactctcctcactttgaaa

SEQ ID NO: 1923 - DNA, 61 bp, Homo Sapiens
ggggaaaaatctaacatatagaaaacaaggmgacccaagattcactgtggaagtcaggcct

SEQ ID NO: 1924 - DNA, 61 bp, Homo Sapiens
aaaaatgaatatttcttgaccacctgttacrtgctaggcatagtgttgggagctagattct

SEQ ID NO: 1925 - DNA, 61 bp, Homo Sapiens
tcctccctgtcctcacacttgaacttcatgrtccaatcacttcaataattatcttgtcctc

SEQ ID NO: 1926 - DNA, 61 bp, Homo Sapiens
aatataaaagtaaagtcaagaaagtgttgcyaggcgtggtgtctcccacctgtgtaatccc

SEQ ID NO: 1927 - DNA, 61 bp, Homo Sapiens
tattaacagagctaaatctctatacaatccrtaaaaacacaatctgtccttacttaattca

SEQ ID NO: 1928 - DNA, 61 bp, Homo Sapiens
agcgctttactgagcgcctgctccggggacrtgggagacactcatgccaagccagcgattc

SEQ ID NO: 1929 - DNA, 61 bp, Homo Sapiens
cgtctgtccatttgcattccttttttgcagytggaaccctgctggtggctttgacaggata

SEQ ID NO: 1930 - DNA, 61 bp, Homo Sapiens
ttgcttagtgaatcgctgatgtaaataaagygggaaattaatcttgcttaaggaaacagtt

SEQ ID NO: 1931 - DNA, 61 bp, Homo Sapiens
ccagggaatggacccatgcaatctgagtgayggatgaagaaaactgctttcagtcctagat

SEQ ID NO: 1932 - DNA, 61 bp, Homo Sapiens
tgagatcatacataaagagcttggcccagcygaggagccgtcacctaaccgtgctcaggag

SEQ ID NO: 1933 - DNA, 61 bp, Homo Sapiens
ttgtctgtcctctttctactttctggatacmttgtatggacctagatgtggttccagggac

SEQ ID NO: 1934 - DNA, 61 bp, Homo Sapiens
agaaagaaaaggatcacaggggtctcagaawtgaaaacaggcctctgtaaaaaggcagaat

SEQ ID NO: 1935 - DNA, 61 bp, Homo Sapiens
acaaccctcccagcagactggatcttttcasatactggtgctcaaaatcaccaactagctt

SEQ ID NO: 1936 - DNA, 61 bp, Homo Sapiens
tttatctttaagctgcatttaccttttttamttgaaaccgcaccaatctcctctttggctc

SEQ ID NO: 1937 - DNA, 61 bp, Homo Sapiens
tttgttcaacatacttgcttttacttgtttktcacttggaactgttaatgacaagaaataa

SEQ ID NO: 1938 - DNA, 61 bp, Homo Sapiens
ctaacaattcagtcaagctcaataacttaakgtatgtctttcacaaatataggttctcctc

SEQ ID NO: 1939 - DNA, 61 bp, Homo Sapiens
gtgggaggtggtctcacagcaggtctttacragcctcccgtctttctgtgttctgggagaa

SEQ ID NO: 1940 - DNA, 61 bp, Homo Sapiens
ggaaatacactaacacagagtgcacataccscatcttttaagccgagttccattacggcat

SEQ ID NO: 1941 - DNA, 61 bp, Homo Sapiens
ctcacttctattttgttactgtccaccttayagctctaaaggtaggcttccttctatgctc

SEQ ID NO: 1942 - DNA, 61 bp, Homo Sapiens
gaagccagtccatgagctgaaccaagtaagwaagagcagaactcacagagagaagtgatct

SEQ ID NO: 1943 - DNA, 61 bp, Homo Sapiens
agagtgtactgaattaattaaaatcttcacrcttcagagagtcttctttagctgaatgctg

SEQ ID NO: 1944 - DNA, 61 bp, Homo Sapiens
caaagtaaagaaaaatttggttttgcaatgyctccaagaaacaccaattacaggaatagtc

SEQ ID NO: 1945 - DNA, 61 bp, Homo Sapiens
agatataaatatacatgaaccatgtgaaagygataaaatgtcttcctgaaagtgaccaagg

SEQ ID NO: 1946 - DNA, 61 bp, Homo Sapiens
aataataaattgaaaagttacctttcgccastgtctttgtttctggtttttcttttttctc

SEQ ID NO: 1947 - DNA, 61 bp, Homo Sapiens
tacacatgatatatacattgctaaaaaccayatttgaatctttcaacttataaatagtaag

SEQ ID NO: 1948 - DNA, 61 bp, Homo Sapiens
tttaacaattaactagattatcaggaaaaawtacagtggaagaacattctcatttaaacac

SEQ ID NO: 1949 - DNA, 61 bp, Homo Sapiens
tttcactctgtgtcccataacctgggaacaytgatatgaggggtggggtcccaaggaattg

SEQ ID NO: 1950 - DNA, 61 bp, Homo Sapiens
aacaattacaatattgatatcaaagaacaayggtcacagatcaccgaaacagacataccaa

SEQ ID NO: 1951 - DNA, 61 bp, Homo Sapiens
acagttgtcactgatatatgactttgagaayatgaactgctgtataaatgttaaatgttcc

SEQ ID NO: 1952 - DNA, 61 bp, Homo Sapiens
cccttacattttacaccagaggtaagtgtcytgctcctttcatactaatccttgccctatt

SEQ ID NO: 1953 - DNA, 61 bp, Homo Sapiens
gacatagtgatatttatcagggtatagcatrgaacaaatattgggtattggccagtagaca

SEQ ID NO: 1954 - DNA, 61 bp, Homo Sapiens
catattggaatattcaaagttaggaatgaaygcgatctgaatcaatcaagtttttaaattg

SEQ ID NO: 1955 - DNA, 61 bp, Homo Sapiens
ggtttgacaactatgagcagctggtgtatgsactagagaataaaagggcagaaggggaatc

SEQ ID NO: 1956 - DNA, 61 bp, Homo Sapiens
atctagtgagcccaggagtagttaaagggawgtttatggccaatggccctagttagaacaa

SEQ ID NO: 1957 - DNA, 61 bp, Homo Sapiens
ttgttagaagacaaccagtatcctacaaggmagtaatgctggtagcaaccgatctttaaat

SEQ ID NO: 1958 - DNA, 61 bp, Homo Sapiens
aaaagaaaagagaaaaaagcagcagaaaccrtttaatcaagtacacaatttttccttatta

SEQ ID NO: 1959 - DNA, 61 bp, Homo Sapiens
atggtgagccagatttggttcatggactgtygtttgccaaatctgatctagagaaatagga

SEQ ID NO: 1960 - DNA, 61 bp, Homo Sapiens
atgggctgataaaaattaaatagggcacaawtgattcccctccagagccatccttttaata

SEQ ID NO: 1961 - DNA, 61 bp, Homo Sapiens
ggtgatctacatctgggctttcagttacatwaaccaattttcctttttttcttgcttcttt

SEQ ID NO: 1962 - DNA, 61 bp, Homo Sapiens
atgcaataaatttagtcaaaggcatgagaarctctgtgaacacgttgagaggtttgtagca

SEQ ID NO: 1963 - DNA, 61 bp, Homo Sapiens
cctttgaaactgcttttacatattttcacgmtatgcagttattactcttctaataaaattt

SEQ ID NO: 1964 - DNA, 61 bp, Homo Sapiens
tattaagtcccaggggtgtattgcccatggycagagaggaaattaagactgctgacatagc

SEQ ID NO: 1965 - DNA, 61 bp, Homo Sapiens
aagtcacacctcagagttctgtcagttgtgmataaccctcaagaatttttactccctcgtc

SEQ ID NO: 1966 - DNA, 61 bp, Homo Sapiens
atatttctttcaagctatgagaatgcaagaytgtggaattttagtaagtagtctatatagg

SEQ ID NO: 1967 - DNA, 61 bp, Homo Sapiens
agataatgaaatccatttgggagctctggamaccttaactggcatagatttgagaagccat

SEQ ID NO: 1968 - DNA, 61 bp, Homo Sapiens
cttgaagtcagggcctctatcacactcacarttgtttacggtgctgaacagtgtcttcggt

SEQ ID NO: 1969 - DNA, 61 bp, Homo Sapiens
taaacattacaactgaactcatgctccatcwctttaattggtgtaatccttagggccttaa

SEQ ID NO: 1970 - DNA, 61 bp, Homo Sapiens
gattgaagagacactgatttgcccaaataayaggaagagggggaagcaagtaatattatgt

SEQ ID NO: 1971 - DNA, 61 bp, Homo Sapiens
actctttagaagtgatgtattagaaatgagytggattttatgaatcattagcaacagtggg

SEQ ID NO: 1972 - DNA, 61 bp, Homo Sapiens
tttgtttttaggcattttccatacaaagatkagcaagacccttcaaaaaccaccaatttgc

SEQ ID NO: 1973 - DNA, 61 bp, Homo Sapiens
gaagacttgccatcaaatgaacttatgacaratgacccaaatgattctcacaaagtagagc

SEQ ID NO: 1974 - DNA, 61 bp, Homo Sapiens
ttaaaatattccattttaacttattaggcarttatggcttcttatatatgctataagcaaa

SEQ ID NO: 1975 - DNA, 61 bp, Homo Sapiens
tgttctactgccttcacatctgctactgccrgcttgtgataatccctctctggaccatggt

SEQ ID NO: 1976 - DNA, 61 bp, Homo Sapiens
cattattaagcaagaggggaaaaatctacckttatgtgaggttgggttgtcagatattttt

SEQ ID NO: 1977 - DNA, 61 bp, Homo Sapiens
atactttagaggcaatttcttgagtggaatyacaaaaccatattcacttatctaaaatgta

SEQ ID NO: 1978 - DNA, 61 bp, Homo Sapiens
cgaggcaacagaaagaagtcctttctcaagwagagagcctcaatcattgaaggacggtggt

SEQ ID NO: 1979 - DNA, 61 bp, Homo Sapiens
tttgaaatgcaaagcactgtaaatgcatacragaaaaatgcagtagtagggctgaatagct

SEQ ID NO: 1980 - DNA, 61 bp, Homo Sapiens
caaagtgtactgtagataaggcaacttgtayagacatcagaattgaatccatttgaagtca

SEQ ID NO: 1981 - DNA, 61 bp, Homo Sapiens
ataaaatataggtataaaataaacatcactsttctggactatttagaaatatagatccaag

SEQ ID NO: 1982 - DNA, 61 bp, Homo Sapiens
ctaatacatcatgtcagaagagttctacaaygttcatcttaataataataagacggccatt

SEQ ID NO: 1983 - DNA, 61 bp, Homo Sapiens
tttctatagtattaattctgaccttcattayttccaatgataattcagataagtctattgc

SEQ ID NO: 1984 - DNA, 61 bp, Homo Sapiens
tcttccaaaacaacgaaataggaacaaatastatgatcagactccatgggtcgttaatcct

SEQ ID NO: 1985 - DNA, 61 bp, Homo Sapiens
tttttgagaaaactttacatctcacacaagraagtataaggagtctctgatattgtaaagg

SEQ ID NO: 1986 - DNA, 61 bp, Homo Sapiens
tcttcctttcttctcaaattggacccaaaargcatagttttgtctgagggaataaaggtac

SEQ ID NO: 1987 - DNA, 61 bp, Homo Sapiens
aggaataaaaatgaagcaaataaatgtggtycatctttcttcaggacctgatgctcctgca

SEQ ID NO: 1988 - DNA, 61 bp, Homo Sapiens
aggtttggcattgttgagagtaaagaataaratagcaactcctcataataactacaaatac

SEQ ID NO: 1989 - DNA, 61 bp, Homo Sapiens
gagctatgatgggaatgaacgtaaatcttcygtaaaggtatcgaaaaggaaaattaaataa

SEQ ID NO: 1990 - DNA, 61 bp, Homo Sapiens
cagctcctcttggataagatggtctactgayaggcctatggtgataaaaatgagcaaaatg

SEQ ID NO: 1991 - DNA, 61 bp, Homo Sapiens
cttgcagtgccccttcaaggtcacatggtgrggcttcaaacgttaacccacagacttgctc

SEQ ID NO: 1992 - DNA, 61 bp, Homo Sapiens
aaaggcatgggtgagaggatgacaatttagsgaggatctgaaggaggtaaggatgtaagtc

SEQ ID NO: 1993 - DNA, 61 bp, Homo Sapiens
atgaccttggtttagcggtcagcaggtagcraggaaagtgatctcaagggccagaaagata

SEQ ID NO: 1994 - DNA, 61 bp, Homo Sapiens
atagtgaatattttaggactgaaactattcygtatcatactgtatgagtggattacacatt

SEQ ID NO: 1995 - DNA, 61 bp, Homo Sapiens
gtgtctttgttatcaacacgttattaagaawgggcaagatgtccttatatactagaagctt

SEQ ID NO: 1996 - DNA, 61 bp, Homo Sapiens
caaagaggcaacacttaagtagtttttgagwcattgagtcatttctatctgggtaggctag

SEQ ID NO: 1997 - DNA, 61 bp, Homo Sapiens
aacagttgacttttctcttttatgggtgaawaaaggctttgggtagcatagaagtggagat

SEQ ID NO: 1998 - DNA, 61 bp, Homo Sapiens
gtcagatttcgaaagcccttttgaagcaggktttatttgatctttccctgtaagaagccac

SEQ ID NO: 1999 - DNA, 61 bp, Homo Sapiens
catgctctgacctgcctccgtagttgaaccygattcctgaggcaatgatatggcaggtccc

SEQ ID NO: 2000 - DNA, 61 bp, Homo Sapiens
cagaggctgctattgaccccactccctgctstcagtacttctggtgcactgggacttccag

SEQ ID NO: 2001 - DNA, 61 bp, Homo Sapiens
gagtagccaaactaaaagtgggatttaaatractccaattttatgaaaagtgaagaagttc

SEQ ID NO: 2002 - DNA, 61 bp, Homo Sapiens
tttatacttgcttcatgtcttatgacaaccrgatccaaggccatgggagtatttcaggaag

SEQ ID NO: 2003 - DNA, 61 bp, Homo Sapiens
ggggaagagctgctcggaggactctgaacakgaagccgcggccggaccgacctggccctgg

SEQ ID NO: 2004 - DNA, 61 bp, Homo Sapiens
ggttaggtttaggtgaattttcattcttccrttttcctaattgctaccataatcacatctt

SEQ ID NO: 2005 - DNA, 61 bp, Homo Sapiens
gtgattagcattactaccctctatgcgtaamtccatgtaaattcctcattgtgttcactga

SEQ ID NO: 2006 - DNA, 61 bp, Homo Sapiens
agtagtttaggtcaaagtcatgatgcagtasgatcagattttgatgagatttttaaaacac

SEQ ID NO: 2007 - DNA, 61 bp, Homo Sapiens
tagtatgtcttctctttgtctcatatagaakggttttcattaaactttaatagctttagca

SEQ ID NO: 2008 - DNA, 61 bp, Homo Sapiens
cacccaaggagctccttgaaagtgacacgtytattcctttcttacatgtcatttccctgtt

SEQ ID NO: 2009 - DNA, 61 bp, Homo Sapiens
gtgtgcttgcctcgcgcctcaggttagagcygcctcagtggcgggccgtgcctcttatctg

SEQ ID NO: 2010 - DNA, 61 bp, Homo Sapiens
gaaacataagcttgatgtgcctcatgtttcratgtgaaagttgtattatttcttgtgtgac

SEQ ID NO: 2011 - DNA, 61 bp, Homo Sapiens
aacagaacaatgtaaatttggctgtttgacrttaacttaatttgaagtgttaacttttccc

SEQ ID NO: 2012 - DNA, 61 bp, Homo Sapiens
atagtttagaaaatagtttgtaaaagattgcwtcacacatatagaatgttttatcaaactt

SEQ ID NO: 2013 - DNA, 61 bp, Homo Sapiens
agttaccaactcctgatcaatcttagttttyctatactctgcctagtttccctatccactg

SEQ ID NO: 2014 - DNA, 61 bp, Homo Sapiens
ttctcaaaggctgagcttccccttgcccttyaggagcaaaagtcttcccctttctactcca

SEQ ID NO: 2015 - DNA, 61 bp, Homo Sapiens
gaagtacaattcaagaaccgtttgttgagcrtgagcagccactacattggaacattgttcc

SEQ ID NO: 2016 - DNA, 61 bp, Homo Sapiens
gtatccaatgttgcagtttataatgcacctkgataatttttttcctataaattgataattg

SEQ ID NO: 2017 - DNA, 61 bp, Homo Sapiens
ttctattttttggttatccagtggtattgtwtgaataggaaaggcaggataaaatatttga

SEQ ID NO: 2018 - DNA, 61 bp, Homo Sapiens
tggaaagaagaattaatcacaaaaacgtcaytttcactctgtgtggttatatgttcttaca

SEQ ID NO: 2019 - DNA, 61 bp, Homo Sapiens
gtgactgcaccatggccctggtataagcaaytccagacagttaaatccagcccttcatcct

SEQ ID NO: 2020 - DNA, 61 bp, Homo Sapiens
tatactctagaaaattacggttctgttgaaytggcatgcttttgttaatgcagattgatgc

SEQ ID NO: 2021 - DNA, 61 bp, Homo Sapiens
ctgaaacaggagcttgaagccttgttctcaygtctaaagccatccaaatataggggccact

SEQ ID NO: 2022 - DNA, 61 bp, Homo Sapiens
tctccttactttcctgttttactgttctatrtccaggtaatggtagttacagcagaagttt

SEQ ID NO: 2023 - DNA, 61 bp, Homo Sapiens
gtctgattgtgaacaaaagaaaaaaccagaygtgaacagcggcagtggcctcacctctctg

SEQ ID NO: 2024 - DNA, 61 bp, Homo Sapiens
actctgttgctgcaggctcaggtttagaccytgcctttgctctgcgcacatgtccttcccg

SEQ ID NO: 2025 - DNA, 61 bp, Homo Sapiens
aaaaactcttttttttcctattagaacatcraatacttctacagaatatttctattctatg

SEQ ID NO: 2026 - DNA, 61 bp, Homo Sapiens
ttcaaatgactgcttacggatagatagctayggactagtgcggctacagtttcaataaaca

SEQ ID NO: 2027 - DNA, 61 bp, Homo Sapiens
ggtagttgattccttttgaaaactgatcacragtaagagattttagttacagctttctttt

SEQ ID NO: 2028 - DNA, 61 bp, Homo Sapiens
cagccctaaccatcaagatggtaaaggctartgtgacccagagacttctgctctctgaata

SEQ ID NO: 2029 - DNA, 61 bp, Homo Sapiens
tttagggctgtgatgaggcaacggtgtccawtgagttgttttagaaaaagtgagtgcgaga

SEQ ID NO: 2030 - DNA, 61 bp, Homo Sapiens
ctcaattgaaagagaggcttgagattacaasgtgaaaactgtttcttgccattattctgtt

SEQ ID NO: 2031 - DNA, 61 bp, Homo Sapiens
aacatctgtaataccataatagcttcttccytggatgccctgcctctaccaggccagttcc

SEQ ID NO: 2032 - DNA, 61 bp, Homo Sapiens
aagcaactagttattgaagtggcttaatttrgcaaggaaacacctaatgagtcaatggctt

SEQ ID NO: 2033 - DNA, 61 bp, Homo Sapiens
aaagagagccagacaaacagcttttcttctstaacactccatttggctggttaacacaagt

SEQ ID NO: 2034 - DNA, 61 bp, Homo Sapiens
tttcttaagagctctgtgctattgactatcytcgtttcctctgcacttcttttcttagtct

SEQ ID NO: 2035 - DNA, 61 bp, Homo Sapiens
ctgacagctaagagaactaggccaatattayaagtagcctaagtgagcagcagagacacag

SEQ ID NO: 2036 - DNA, 61 bp, Homo Sapiens
tcttattatcctgaaaatacaagactaactrtagcagacgaaagcttgaataatcatgcct

SEQ ID NO: 2037 - DNA, 61 bp, Homo Sapiens
atgcagtggagatggcttctctccttcaacytcatcaaccaacctctactaccttcaaatg

SEQ ID NO: 2038 - DNA, 61 bp, Homo Sapiens
gttctccacatcagcaatgagactgtctcamattcatattatttatgtgttcactggagta

SEQ ID NO: 2039 - DNA, 61 bp, Homo Sapiens
gaacacaacagtgaacgtgacagacaaggtmcttgtaaaacacacggtctcgtggggaagg

SEQ ID NO: 2040 - DNA, 61 bp, Homo Sapiens
acctgaagattgtatttggttgcatgtaccrgaatactgactacagaagtataaccaattg

SEQ ID NO: 2041 - DNA, 55 bp, Homo Sapiens
ggggaaggatgctgcattgttccaacatgaygggagttgatgccagctgagtacg

SEQ ID NO: 2042 - DNA, 61 bp, Homo Sapiens
ctttaaataagaaaagtgttcccaatggagytctattccactacactttatagtaaattgt

SEQ ID NO: 2043 - DNA, 61 bp, Homo Sapiens
ggaagtgggatggggcggagaattatcttcrtttgtatcacttgaggaatagctgagtgaa

SEQ ID NO: 2044 - DNA, 61 bp, Homo Sapiens
gagaaggaggagctgaagtaaacacccccawccttgtcagtctttggttaaagactctcct

SEQ ID NO: 2045 - DNA, 61 bp, Homo Sapiens
atgatatttactaaacagtttcaagcacagraatgccatggtcacatttttcattgtaaaa

SEQ ID NO: 2046 - DNA, 61 bp, Homo Sapiens
catggagaaaatgaggctcgacgtccctcarattccaggccatgcacctggatctgcatct

SEQ ID NO: 2047 - DNA, 61 bp, Homo Sapiens
aagattagatttgcatttaaaaagatcaatktgcctacaatgaacagaatgtttgaagaag

SEQ ID NO: 2048 - DNA, 61 bp, Homo Sapiens
attatagtcatttatgtggcagtaaatcaakccttattggtatactaaaatctaggtatta

SEQ ID NO: 2049 - DNA, 61 bp, Homo Sapiens
cctgggattccttttctttagtgttgtactygtgatttttagcttaaaaggccagaagtgt

SEQ ID NO: 2050 - DNA, 61 bp, Homo Sapiens
atcctttcatgattactttagagcaggaatrcccaatcttttggcttccctgggccacatt

SEQ ID NO: 2051 - DNA, 61 bp, Homo Sapiens
agcccagcctccaagataagacgcacatgtkaggagcagcggacatcagtgtgagccaagc

SEQ ID NO: 2052 - DNA, 61 bp, Homo Sapiens
ctagttttcttgcatggcctatgagttcccrtccactctgtaagcctttataagtgttatg

SEQ ID NO: 2053 - DNA, 61 bp, Homo Sapiens
gcccactgcttcccaccaatgagttaagtartttttcttgcccatttctgcaaatttgtgt

SEQ ID NO: 2054 - DNA, 61 bp, Homo Sapiens
acagcaacagtaattcaccttcaaaatcccyaaaacgtggttgaataaacaaatgaagaac

SEQ ID NO: 2055 - DNA, 61 bp, Homo Sapiens
gggataattaatacatggcagtcggggagaraggagggaaaaggaaacgaagacgggagag

SEQ ID NO: 2056 - DNA, 61 bp, Homo Sapiens
ggtgagcacttacttactgcttctttgccastcttgctgaatttggatttatactttttgt

SEQ ID NO: 2057 - DNA, 61 bp, Homo Sapiens
tttataatttgaaagtgaagtcgtgtgtttsaaagtgctttgtaagctgtagaactttcta

SEQ ID NO: 2058 - DNA, 61 bp, Homo Sapiens
tatgttagctcaataaatgaaagagagatgytgccaatcagagacgttcccctttaattaa

SEQ ID NO: 2059 - DNA, 61 bp, Homo Sapiens
atttagatgagaccctggactgatgctgtamaacttaagaactttgaggccactgaaatgt

SEQ ID NO: 2060 - DNA, 61 bp, Homo Sapiens
accgccttagggctgaaggtgagacatgctsaaggcaatactgctctttacggcacccaga

SEQ ID NO: 2061 - DNA, 61 bp, Homo Sapiens
aatctattcaaatcttttgctgttttgtatrtttgagtattcatcctcttagtattgagtt

SEQ ID NO: 2062 - DNA, 61 bp, Homo Sapiens
ggaagaggtcctactcactttgttcctgcartcaaggctagctagagttccgtttggagta

SEQ ID NO: 2063 - DNA, 61 bp, Homo Sapiens
tttactgaattcgtgtatcagttcaaatagyttgtttgctaaagtctttatgttttttgaa

SEQ ID NO: 2064 - DNA, 61 bp, Homo Sapiens
atgcctctcgcccacgacacctgagttctgrctcctacaattccacatcacagtgctttta

SEQ ID NO: 2065 - DNA, 61 bp, Homo Sapiens
ttcttctggtacatttctctcaaattcttayggcaaatgttttgatggattctattactct

SEQ ID NO: 2066 - DNA, 61 bp, Homo Sapiens
ggacgaggaagagctcaacgcttaggtcacrttgtctggctccaaagactccacattgcac

SEQ ID NO: 2067 - DNA, 61 bp, Homo Sapiens
ccgggggtcgcttgttgaaagcgcttcttcyggctgcagggtgttctgaaatgaatttatc

SEQ ID NO: 2068 - DNA, 61 bp, Homo Sapiens
ctcaccttcgtggttgaccttgtagtgcagsgtgacggggccgctgcacctctggatggtc

SEQ ID NO: 2069 - DNA, 61 bp, Homo Sapiens
atgcaaacagggaagtctttcttacgtttgygccaaatgatacaatcaccaataatgaaat

SEQ ID NO: 2070 - DNA, 61 bp, Homo Sapiens
tatagttaaggaaacggagatcatctgattkgctgtaagtctcacagttactcactggatg

SEQ ID NO: 2071 - DNA, 61 bp, Homo Sapiens
ttcaagatattttcctttcacccctcattcytctcctgaaccaacagaagaagagatgcag

SEQ ID NO: 2072 - DNA, 61 bp, Homo Sapiens
ttgaagaaagagtttcacatcactaaaaaaragtttggaggcctgtgttgaacggcagcag

SEQ ID NO: 2073 - DNA, 61 bp, Homo Sapiens
ccagctccatgtcaggtgcaatgggtgcttygtaaatgctcacatcccttctctttctccg

SEQ ID NO: 2074 - DNA, 61 bp, Homo Sapiens
gctgtttgatagtgtgtccagctccatgtcrggtgcaatgggtgctttgtaaatgctcaca

SEQ ID NO: 2075 - DNA, 61 bp, Homo Sapiens
gcgcccactatagactttcatgggaagagtyggcctcgtggtgtcagaggggagtccaaat

SEQ ID NO: 2076 - DNA, 61 bp, Homo Sapiens
tgctgaccgccacggaactggcagccaagamataaggcaatcggaagagtcagactgtccg

SEQ ID NO: 2077 - DNA, 61 bp, Homo Sapiens
tttttatggtcggacttcagaagcatctccrttaaagctgggaccaaggccagctgtctcc

SEQ ID NO: 2078 - DNA, 61 bp, Homo Sapiens
ttagagctataagaaatggccaatccgcctygcccaacagacacagtgtccgtcagccacc

SEQ ID NO: 2079 - DNA, 61 bp, Homo Sapiens
agcctccctctcgccccagaatagacctgcrgcagctcgaggaactggtacctcagaagga

SEQ ID NO: 2080 - DNA, 61 bp, Homo Sapiens
tgtgcttttcttctggtgccctgttttggcrtttgtgtcatagttatactgatgcctaatt

SEQ ID NO: 2081 - DNA, 61 bp, Homo Sapiens
ccacaggtcacctaaacccaactcttcataygtcttccaaggaaccacgtcgctaaacaag

SEQ ID NO: 2082 - DNA, 61 bp, Homo Sapiens
actccgcgggacacgaggacacgggacggcrtctccagaattgcttgttacgtaggaagcg

SEQ ID NO: 2083 - DNA, 61 bp, Homo Sapiens
ttttaaaccctgcatacgttttagcacctcrttctataatcataatacagcatttagtggc

SEQ ID NO: 2084 - DNA, 61 bp, Homo Sapiens
tacctgtatcataagattatgtgaattttargtgaagtaaggtcagtgcctaacagattgt

SEQ ID NO: 2085 - DNA, 61 bp, Homo Sapiens
ccctaatgattatctaccttgaaaggcccaygttttactagaccaccacactccacccccc

SEQ ID NO: 2086 - DNA, 61 bp, Homo Sapiens
tttagttatttctctttatatttaaaatagwtttgtaagtgatccacgaatgtgttccaaa

SEQ ID NO: 2087 - DNA, 61 bp, Homo Sapiens
tatgtgtatctgtttctaaatatgctttgtyggtttcctttttcttttttaaaaatttcat

SEQ ID NO: 2088 - DNA, 61 bp, Homo Sapiens
gcacaaggaagatatgtataagaaggaaacrtagcaaaggcaaaatattctagttcacttc

SEQ ID NO: 2089 - DNA, 61 bp, Homo Sapiens
tctaaaagtgtcccagtttggacaacaaatyatgtcatcaccccacttatggtttctatta

SEQ ID NO: 2090 - DNA, 61 bp, Homo Sapiens
ttttgaggacttagtcataaattatttcctraggcccatgtctagaatggtgtttctgagg

SEQ ID NO: 2091 - DNA, 61 bp, Homo Sapiens
catttcattgggcaatctctgcattcctgaygaccaaagtttctgtctcgatcttccagtt

SEQ ID NO: 2092 - DNA, 61 bp, Homo Sapiens
ctgccaggcacaactgagatccagaaataasaggattagcgagagaaggggaaatatgcag

SEQ ID NO: 2093 - DNA, 61 bp, Homo Sapiens
tctttaaaaacatttcagctttgcacctagyagtttaaatgcatccattcacctctgtttg

SEQ ID NO: 2094 - DNA, 61 bp, Homo Sapiens
tacaattctcatctctccaagttggagggtstttaatctgtgctgaagatgaggaggcaga

SEQ ID NO: 2095 - DNA, 61 bp, Homo Sapiens
catttgaaataaaatatattgaacttccacmaaccaaataagatcaaatgttcatttttaa

SEQ ID NO: 2096 - DNA, 61 bp, Homo Sapiens
taaagggctgttcttgactgcaggcagagcygatttctgaacatggactgtggggttcttt

SEQ ID NO: 2097 - DNA, 61 bp, Homo Sapiens
atgtgattaccagacattttagtggaatagwtgaaatttaatatagaaagttttcaaaatt

SEQ ID NO: 2098 - DNA, 61 bp, Homo Sapiens
aaaggaacacatttaaataaatgacgtttasaaagttacatacatacatacatacatacat

SEQ ID NO: 2099 - DNA, 61 bp, Homo Sapiens
attttggactgctgatggaaaggtgaagttratatcaaattgttgtgtcttcattactaaa

SEQ ID NO: 2100 - DNA, 61 bp, Homo Sapiens
agtgatctagactaaatctggatgacttgcygtatagcttctacatcaggacttgctgctt

SEQ ID NO: 2101 - DNA, 61 bp, Homo Sapiens
ttttactctcctgactcccaccaggattaasactattgcaatactttaagtgttgagcagt

SEQ ID NO: 2102 - DNA, 61 bp, Homo Sapiens
agtgctgcctggatccgttgtgttttttcaytgcaaaaggtgagatgacttcctaaaccct

SEQ ID NO: 2103 - DNA, 61 bp, Homo Sapiens
gagaataattgaaatttgtgatcctggaagrtgttaaagagaatgagatctttggttgtta

SEQ ID NO: 2104 - DNA, 61 bp, Homo Sapiens
gtctccagccaatgactgaacatggtgataktagtaaagcctgaccatttttgcccagtat

SEQ ID NO: 2105 - DNA, 61 bp, Homo Sapiens
ttaatttgtttaacgttatggagaattaggytcataatgtgacagtgatagtcctgaagaa

SEQ ID NO: 2106 - DNA, 61 bp, Homo Sapiens
aaaatgcaggtcagatgctaggttggctaastgttttgaggctacaaactgctttttaggt

SEQ ID NO: 2107 - DNA, 61 bp, Homo Sapiens
tgagcctccagcagttcatcacagtgcaggyttttctaccctggaacaaatttccacggag

SEQ ID NO: 2108 - DNA, 61 bp, Homo Sapiens
atcacagtgcaggcttttctaccctggaacwaatttccacggaggttcctgttgatgggtt

SEQ ID NO: 2109 - DNA, 61 bp, Homo Sapiens
ttgtactcagggtctatcaattttgaagctsatttttttttgtcatctaattgacatgtct

SEQ ID NO: 2110 - DNA, 61 bp, Homo Sapiens
cttaagtaagaaaatgactcttgacttgaakgatgaaaatgatgcaggcaatcttataaca

SEQ ID NO: 2111 - DNA, 61 bp, Homo Sapiens
ccattactattaaagtgtaactttttctcayaccagctttctaatttattgatcttcttct

SEQ ID NO: 2112 - DNA, 61 bp, Homo Sapiens
gatccatggaataggattgagagtttctgtktctatttacatatatgtaaataaactctta

SEQ ID NO: 2113 - DNA, 61 bp, Homo Sapiens
ccccaggaaccatttggttgcttgtaattasaatgaaagtgcttttaccctgtaagagagt

SEQ ID NO: 2114 - DNA, 61 bp, Homo Sapiens
aactgcacctgatggagtctgtcaatcaggktgcaattaattttacttcatgcactaactg

SEQ ID NO: 2115 - DNA, 61 bp, Homo Sapiens
agttagtcaggaagttcttctgctgacagcmctggttaacaaggttagcaaaagggttcca

SEQ ID NO: 2116 - DNA, 61 bp, Homo Sapiens
gttgacggaattttattcttaaggctaatgstgcctgtaaaacaattaacaaagtattttt

SEQ ID NO: 2117 - DNA, 61 bp, Homo Sapiens
ttatgttcagaatacagtattttgagaagastaaatttggagtaacagctgtagttatacc

SEQ ID NO: 2118 - DNA, 61 bp, Homo Sapiens
tgatggctacagacagagggtataaaatgayccagaaggccaaacagacccaaacagactc

SEQ ID NO: 2119 - DNA, 61 bp, Homo Sapiens
gggaaagaagaaaagattccgtattttttaytctggcttccttgagcacagctttcttctc

SEQ ID NO: 2120 - DNA, 61 bp, Homo Sapiens
ccctcccgtcgcggatagtggacaggagctkagaaaatacatggaccaaatgaaaatgact

SEQ ID NO: 2121 - DNA, 61 bp, Homo Sapiens
tgtctcctctgtcatctgcctctggagacgygactttatacccggcagctttttgaactct

SEQ ID NO: 2122 - DNA, 61 bp, Homo Sapiens
tcttgccattttgcttaattgtatgattatstgaaagtaggaatagaatcctttgaactct

SEQ ID NO: 2123 - DNA, 61 bp, Homo Sapiens
gaaaaataaatgtttcctctaccatgattcrgccaaatgcctgtcagggaaaaatccatct

SEQ ID NO: 2124 - DNA, 61 bp, Homo Sapiens
ccagtgagccaaattttaagtaaacagaaayggaaggtgctaagcaaacaaactccagcca

SEQ ID NO: 2125 - DNA, 61 bp, Homo Sapiens
ctcgcaaggactgtttacatctaacattgchtagatctgaaataaataacactaggaggaa

SEQ ID NO: 2126 - DNA, 61 bp, Homo Sapiens
cctttgtgaattaatattaacagataaagtrgagatccgaggcacttacatgagtaaataa

SEQ ID NO: 2127 - DNA, 61 bp, Homo Sapiens
tcaaaaagcttattatagtcttagttgagarccaagcaattagtgcaactattcacttagt

SEQ ID NO: 2128 - DNA, 61 bp, Homo Sapiens
actatattagacattacggagcatataaaakaaggcaaggagctgtccttgaggagctgag

SEQ ID NO: 2129 - DNA, 61 bp, Homo Sapiens
gaaggtcttcagttgagctctcagccttagkaaggaagcacgtggaggagggacggaggag

SEQ ID NO: 2130 - DNA, 61 bp, Homo Sapiens
ctctctgctgagataatgtagtgactgctargattccagatatttaactagaatctaaata

SEQ ID NO: 2131 - DNA, 61 bp, Homo Sapiens
agctctgcagtccaccacacataagcacagygcatggaaaatgggaagacagcttcttcag

SEQ ID NO: 2132 - DNA, 61 bp, Homo Sapiens
gttccttagtgctcaataatataagacctgktgttattagaacgagtctttcttataaact

SEQ ID NO: 2133 - DNA, 61 bp, Homo Sapiens
tttccttaagtatgtcaaaatgagctacttyattcccacgttgaagggaggaaaagattat

SEQ ID NO: 2134 - DNA, 61 bp, Homo Sapiens
ccatagtgagaccttagagtctggacaacayctgtttacactggcctcatagtattctacc

SEQ ID NO: 2135 - DNA, 61 bp, Homo Sapiens
aactttttttttcttgtaggtttgcacatastaactttaaaatacatacaatcccaatcca

SEQ ID NO: 2136 - DNA, 61 bp, Homo Sapiens
cagattcagtagtatgtgatgtgccaaagayagttttggaactgagacccggagtcacagc

SEQ ID NO: 2137 - DNA, 61 bp, Homo Sapiens
cttcaaaaagcctctgctgagatctagtgamcgccagaaaacagattttagcaagcttagg

SEQ ID NO: 2138 - DNA, 61 bp, Homo Sapiens
ctttacccacacgaagctattgctcatccaracattccattttatacaactcattaaggat

SEQ ID NO: 2139 - DNA, 61 bp, Homo Sapiens
ttgagcatgttagttaacatctctggattcmctttctcctctgtaaactgagataaagaga

SEQ ID NO: 2140 - DNA, 61 bp, Homo Sapiens
tatccacttacctaccaaccagttcattcawttacccacctacttttatccatccgtccat

SEQ ID NO: 2141 - DNA, 61 bp, Homo Sapiens
tggagctgggtcttgacactgagctcttgcrttcctcgcctccctttctcttggcatttcc

SEQ ID NO: 2142 - DNA, 61 bp, Homo Sapiens
gcattctacatggccactggcattggcacamataggtttggcacataccctctttgtgtgg

SEQ ID NO: 2143 - DNA, 61 bp, Homo Sapiens
cagaacaatgtgtcactaccagaaaccattygctatctctgttccttgtttgtatttctgc

SEQ ID NO: 2144 - DNA, 61 bp, Homo Sapiens
tcagtcctgactgcctctctgtgctcttcasattgacctgcttcagttgtctctatcatcg

SEQ ID NO: 2145 - DNA, 61 bp, Homo Sapiens
aatgcattggcttttactttggatactcccrcatctaggagatatgggagcctttggaggt

SEQ ID NO: 2146 - DNA, 61 bp, Homo Sapiens
tcccatttaggtaatataggataatttcctygtctaaagatccttcacttattcttatttg

SEQ ID NO: 2147 - DNA, 61 bp, Homo Sapiens
ggttaaatgtgtcttgatttgaatggatatrgatggcgtgattttggtgtttctgccccaa

SEQ ID NO: 2148 - DNA, 61 bp, Homo Sapiens
gtcctcccctccaaataccgtgggaatagarctgcttcatcatgtccctgtgggcaccgtt

SEQ ID NO: 2149 - DNA, 61 bp, Homo Sapiens
tgaccttctggatgtgggatccattcttttyggccccacagaaggcactggagggtttggt

SEQ ID NO: 2150 - DNA, 61 bp, Homo Sapiens
cgctctgctgtcattgtcattcaggttgttscaatgtcccatcctttaggaggtcagcctt

SEQ ID NO: 2151 - DNA, 61 bp, Homo Sapiens
tatcctgcataaggaagggaccttccagccwtgttggtacaccaaaatgtgggaggcatgg

SEQ ID NO: 2152 - DNA, 61 bp, Homo Sapiens
agcattttgtatttttaatagataactgcayttttactcaatatcccttcgaaacactttt

SEQ ID NO: 2153 - DNA, 61 bp, Homo Sapiens
agagtgatccttcttgtctgtcttatttttrccatctttgaagtcacctgaaagtaataaa

SEQ ID NO: 2154 - DNA, 61 bp, Homo Sapiens
ctgacgcaagaatcttaaaacctcctatgaytgtgaaaatatatatttctcctttttctcc

SEQ ID NO: 2155 - DNA, 61 bp, Homo Sapiens
caaaagaaaactgatggtatactgttatctrtctataatgtccagagtttcataactaaaa

SEQ ID NO: 2156 - DNA, 61 bp, Homo Sapiens
agcaggaactgagtgacaaccccatcagcamtgggcagcccaagccagagaaaatagtttc

SEQ ID NO: 2157 - DNA, 61 bp, Homo Sapiens
acttttatcaccattcaggccaaaaaaatgsctttgtatttgttgatggtttctggctggc

SEQ ID NO: 2158 - DNA, 61 bp, Homo Sapiens
cagggtattgtgaaatcacagaagtgttaasagccagttccttttttgatcatatgaggga

SEQ ID NO: 2159 - DNA, 61 bp, Homo Sapiens
gataaaaacaaaatgcacagcaaggctcgtrtagttaactacaggttctcatgagtacaga

SEQ ID NO: 2160 - DNA, 61 bp, Homo Sapiens
aattttattataaatttgaatagcatttcartgatagcctaccttccaccattactgtctc

SEQ ID NO: 2161 - DNA, 61 bp, Homo Sapiens
caagcatgatatcctagaaaatcctcacatwgaagctttaagtaactcaatcaaggtcata

SEQ ID NO: 2162 - DNA, 61 bp, Homo Sapiens
gcagggtgtggggagggagtgatacagatayttgcagccatctttaatacacccaagtggt

SEQ ID NO: 2163 - DNA, 61 bp, Homo Sapiens
gttgccagcagaccctttgcttatacgacgygcagtctaataaaaaacaggcagtgctact

SEQ ID NO: 2164 - DNA, 61 bp, Homo Sapiens
cacgagggcagggaaataacagggctgatayggaaacagctgtgggcaaggcaaggcccaa

SEQ ID NO: 2165 - DNA, 61 bp, Homo Sapiens
ttaacaatcatcatgctaaatcatgcctagycatgaaagagtttttggttgtatgctttaa

SEQ ID NO: 2166 - DNA, 61 bp, Homo Sapiens
caagaggacaaaactgcagtgggaagaaaaygtcctttagggtcagacaaaattaggtttg

SEQ ID NO: 2167 - DNA, 61 bp, Homo Sapiens
tggaatacatttaaacttctcaggctggcartaaatctcaggccaatttatttagacaact

SEQ ID NO: 2168 - DNA, 61 bp, Homo Sapiens
ttgataaataaaaacttctggtttaagtagrgaagaagatgttttaaggtcggttcttgga

SEQ ID NO: 2169 - DNA, 61 bp, Homo Sapiens
ccttcagttcttgggaactgtgaccgacttyctgtcatgctggtccatgtagccacccatt

SEQ ID NO: 2170 - DNA, 61 bp, Homo Sapiens
agacatgtccacactccccagcacacattcygtaatgtcaccacactggcatgaggtttag

SEQ ID NO: 2171 - DNA, 61 bp, Homo Sapiens
agctcctggcacacggacacccttgcttacsgttcacatttctaaaaatgttgcctctgtc

SEQ ID NO: 2172 - DNA, 61 bp, Homo Sapiens
gaaaaatatgaaagtaaatagtgaaaaggtragttatgagcttagattacctagattattc

SEQ ID NO: 2173 - DNA, 61 bp, Homo Sapiens
ggctatcaagaaccattcagtaatgtagggwtctatggtcagatgttggggaaatgttctc

SEQ ID NO: 2174 - DNA, 61 bp, Homo Sapiens
ttggttctgagtgatttcgtaatggcaactygtttaattgtcacagtaactcaataaaatt

SEQ ID NO: 2175 - DNA, 61 bp, Homo Sapiens
atcagtaattcactttctcctcacaggcaarattaagtctatcaatacagtactcagaagt

SEQ ID NO: 2176 - DNA, 61 bp, Homo Sapiens
catatgcctgtagctttgcctattaatttaygacccagcagagttaaacagttaagctttg

SEQ ID NO: 2177 - DNA, 61 bp, Homo Sapiens
attatttaattttgaattaaattgtcacatwatcagtcaaatagctgtgttccctaacaac

SEQ ID NO: 2178 - DNA, 61 bp, Homo Sapiens
attatcataacctttgattcagtaattccartcctaagaatcaatggtaggaaaacattca

SEQ ID NO: 2179 - DNA, 61 bp, Homo Sapiens
taacctcaggagtgatgacaaccaaaacctsttgttaatatgtcttctaaaatgtgaaact

SEQ ID NO: 2180 - DNA, 61 bp, Homo Sapiens
attaagtctataaaattaatctatcaatagsctgttctttttaatttgctaagaatgcacc

SEQ ID NO: 2181 - DNA, 61 bp, Homo Sapiens
cctgttttcactcatctcttcctttaacccrgattccaagaaagcttgacaactgtctaca

SEQ ID NO: 2182 - DNA, 61 bp, Homo Sapiens
ttgtttgtgatgcactggcactagtttccgygttccccttggtaggtgtagaagtgtttga

SEQ ID NO: 2183 - DNA, 61 bp, Homo Sapiens
agaattaaattacatgtttattgaggcattkagaagtcgcctaacatctttcttggcctgt

SEQ ID NO: 2184 - DNA, 61 bp, Homo Sapiens
gtagaagttgaaaggaaaaattggtctgaastgtacttaatccaaaacttaacttgaagta

SEQ ID NO: 2185 - DNA, 61 bp, Homo Sapiens
taagacagctgatcttagatgacagcatcagktgggaaaaaattggttttgtttctctata

SEQ ID NO: 2186 - DNA, 61 bp, Homo Sapiens
ttgacacgcttgaagagaatcctaagtagtyagaggaggttcttcggctgatctgtagtta

SEQ ID NO: 2187 - DNA, 61 bp, Homo Sapiens
gaaagtcctctaagaattggaatgcttggaytgttaaaagtatccactgaaaataaattaa

SEQ ID NO: 2188 - DNA, 61 bp, Homo Sapiens
tgaaagttacctattaggtacagtgtccaaygtttgggtgatgggtaccccagaagcctaa

SEQ ID NO: 2189 - DNA, 61 bp, Homo Sapiens
atctatcaatctatcatctatctagtctatmtacctacttatctctaatcacccaccaaaa

SEQ ID NO: 2190 - DNA, 61 bp, Homo Sapiens
aatagtccctagggtctggccatgtggtatycttgcttgtcagagtttaaagagacttgac

SEQ ID NO: 2191 - DNA, 61 bp, Homo Sapiens
cactatcttggtagagaagggcaaacaacartgagagccttggagctcagcatctaggagt

SEQ ID NO: 2192 - DNA, 61 bp, Homo Sapiens
ctcccactatggtaatatgaccattttagtwgttataaaacagtatgaggagataaatgtt

SEQ ID NO: 2193 - DNA, 61 bp, Homo Sapiens
accaggagattcaaatgctagagttggtaawcttttggaagtaccttggccatctgaacca

SEQ ID NO: 2194 - DNA, 61 bp, Homo Sapiens
gagtcaccctggtgtctgtgaccaaggaatwtgagggccacaaggctgtggtccaagacct

SEQ ID NO: 2195 - DNA, 61 bp, Homo Sapiens
acgatttaaactggacgaaacaatttgcgcrctaccctggctggggactgatgcggaagat

SEQ ID NO: 2196 - DNA, 61 bp, Homo Sapiens
catcttcacaacccaccacctggatgaagcygaagcgctgagtgaccgcgtggccgtcctc

SEQ ID NO: 2197 - DNA, 61 bp, Homo Sapiens
cgccctcactgcactctgaagcttttcttcrtgacacttctcccaacttgttatgcatgct

SEQ ID NO: 2198 - DNA, 61 bp, Homo Sapiens
gttgtcactatcttcttaaatgtgaataacragtccaaatattatattggaagctaatcat

SEQ ID NO: 2199 - DNA, 61 bp, Homo Sapiens
ttccatgctcagaattctaaaccagtcttgraatctcactgcatcactgcatatacctttt

SEQ ID NO: 2200 - DNA, 61 bp, Homo Sapiens
tatttgttggtgttctgtcatctcaaaaacrtccaccaggttttgcaaaatggtcaccggg

SEQ ID NO: 2201 - DNA, 61 bp, Homo Sapiens
tttacagtcaagcagagaaatgatccctacraacagatgggaaagtcttataggtagatac

SEQ ID NO: 2202 - DNA, 61 bp, Homo Sapiens
ctcacaatgaacagcagcagtgggggcgacracttggacctcacccgtgtgcttctgcgga

SEQ ID NO: 2203 - DNA, 61 bp, Homo Sapiens
ttgctgaatttcacaatggaatttgccattyttttctgctaattgaccagggcctgggcaa

SEQ ID NO: 2204 - DNA, 61 bp, Homo Sapiens
ggaaagtcgcttgttttaatctgagttgtayccccccacaatttatacattgaacccccag

SEQ ID NO: 2205 - DNA, 61 bp, Homo Sapiens
tggggttgtgaaattcagaggtccaaaatasggtgaggtgatggttaggtggggcttggtg

SEQ ID NO: 2206 - DNA, 61 bp, Homo Sapiens
agaaaagacagcaagaaggccatttttcacrttggctgtaaggcgagatttgatcaagaac

SEQ ID NO: 2207 - DNA, 61 bp, Homo Sapiens
tacttctcatcctcttgagttttccacacaygaatttattgtctgtaaattactgctgaaa

SEQ ID NO: 2208 - DNA, 61 bp, Homo Sapiens
agaaataataactcaaatgtttaaatgaagkttcaatgctataccacataaaatccacctt

SEQ ID NO: 2209 - DNA, 61 bp, Homo Sapiens
cctggcagtccccaccccatctgtttagtgyacatgcaggtccttagcctaagttactcca

SEQ ID NO: 2210 - DNA, 61 bp, Homo Sapiens
taaaaaaatggtctaactgtgcctctatgtwtgtatgtatcaattatctgtctgcatgtac

SEQ ID NO: 2211 - DNA, 61 bp, Homo Sapiens
tcattttaatagctaacacatggatgaactyttacttaaatgagtgatatattctcctact

SEQ ID NO: 2212 - DNA, 61 bp, Homo Sapiens
aattctggggcttaaacaagcacattccaarttaagaaccaatgacctaagggaatgtctg

SEQ ID NO: 2213 - DNA, 61 bp, Homo Sapiens
gaactatggaatgatgtgctactgagttatrtttttctatattttactttagtttaaagca

SEQ ID NO: 2214 - DNA, 61 bp, Homo Sapiens
atactccctgagtttttaacttaagtcaaartgacttcgctacgaaaagggtctacttcag

SEQ ID NO: 2215 - DNA, 61 bp, Homo Sapiens
ggatatcacacaaagacaaaaaatccccacsaaagaggctcacaatagaagggacagtgac

SEQ ID NO: 2216 - DNA, 61 bp, Homo Sapiens
attttaacgtgttacgttgtatgctcacaartgatctcatttaaatggaaataatgtaagc

SEQ ID NO: 2217 - DNA, 61 bp, Homo Sapiens
ttttaaaaagtcctgtgttgactttaaagcrgctcagagacatcgcctaaggcaagactaa

SEQ ID NO: 2218 - DNA, 61 bp, Homo Sapiens
cttcaggaaagttctagaacgtatgcatcaygcacccactcatctcctacactcctattta

SEQ ID NO: 2219 - DNA, 61 bp, Homo Sapiens
aatgaggccttggctaagtggtgctaaaaarcaatttccatctaaacacctggttgataat

SEQ ID NO: 2220 - DNA, 61 bp, Homo Sapiens
ggccagggcacacatgtcgccagcagccatrgatcgtttctgtagctctcaggtcactagg

SEQ ID NO: 2221 - DNA, 61 bp, Homo Sapiens
gagaccagtgaggcccagaggcatgtccgcraggagagtgtgcgcagcccggctctgctgc

SEQ ID NO: 2222 - DNA, 61 bp, Homo Sapiens
ggttctaggcatggagaagagggtggagacyaattgaaacccctaccggaggagactttat

SEQ ID NO: 2223 - DNA, 61 bp, Homo Sapiens
aggaagtctaatggtgaaaatgatttaattmgcagaagcaaccaaaacaacacacttaaga

SEQ ID NO: 2224 - DNA, 61 bp, Homo Sapiens
ttcacttttgagacagtcacaaaccccatcytgttcaagaactcagtcttgttccctgcca

SEQ ID NO: 2225 - DNA, 61 bp, Homo Sapiens
ccactctataaagaggagcagtatcatggarttgcctttctgcacagaagctgctgttcat

SEQ ID NO: 2226 - DNA, 61 bp, Homo Sapiens
cactatcccagagtcagagctataactgaaygctcaagttagggtctttcaggaatatgtc

SEQ ID NO: 2227 - DNA, 61 bp, Homo Sapiens
aacactgagtgcctgtttcattcctctcttycccactcagagggagatgttatgaaccagg

SEQ ID NO: 2228 - DNA, 61 bp, Homo Sapiens
attgggcatacaggtagggatcccagtgtcrgaggcatttaacaagaggaactccatcttg

SEQ ID NO: 2229 - DNA, 61 bp, Homo Sapiens
tgtggtctcttctttgacccattagttgttsaagatgctgttatttgatgtccacatattt

SEQ ID NO: 2230 - DNA, 61 bp, Homo Sapiens
ctcattcaaattaactcagctctagccttcygtcaaagcattgtgccaaatgtaacagcat

SEQ ID NO: 2231 - DNA, 61 bp, Homo Sapiens
cattgtcaacagacatgagctcttattgtcrctattttttaagagtcaaataaaccccacc

SEQ ID NO: 2232 - DNA, 61 bp, Homo Sapiens
agaaaagggcaaggggtaatgggagcaaagsaaagttccatgaaagtctagatcccagatg

SEQ ID NO: 2233 - DNA, 61 bp, Homo Sapiens
caatcacacaagctattgggtgaaatgacaragatgctctgagcatgtgaagtggagtaga

SEQ ID NO: 2234 - DNA, 61 bp, Homo Sapiens
cttaagtttttaggcagtgttgtcattatcsttgtgttttgaaacggtcttgtattttatg

SEQ ID NO: 2235 - DNA, 61 bp, Homo Sapiens
agaacacatcaccatccaaagaaagaacagytcctctggcagcttccttgcaaggaagaga

SEQ ID NO: 2236 - DNA, 61 bp, Homo Sapiens
gatgttgatgtatatttttgacatgaaattwtgcttatggtacactattaggttaaaaaaa

SEQ ID NO: 2237 - DNA, 61 bp, Homo Sapiens
ttgcatatgaaagattagctaaacaaaaaarttcagttgttatcaaagtgttccagaaaca

SEQ ID NO: 2238 - DNA, 61 bp, Homo Sapiens
gaatatgaaaatacagaacctgtggattagraaggctgactccacatactacattttcttg

SEQ ID NO: 2239 - DNA, 61 bp, Homo Sapiens
acagagtctttaagaggtatgaaggaattgytgtaggccaacagcatgtggctcttaataa

SEQ ID NO: 2240 - DNA, 61 bp, Homo Sapiens
ttttctcaggttttctctttgtcctccactyttatttttccacaccagagtttccagtata

SEQ ID NO: 2241 - DNA, 61 bp, Homo Sapiens
ggcctggtagagaatcctggtcaattgcagygtgttgtgggtaaggtcaggttgaagactg

SEQ ID NO: 2242 - DNA, 61 bp, Homo Sapiens
acatgcactgtgacagctcccagcggcaggyagattaatctgaataatgtcagaatgactt

SEQ ID NO: 2243 - DNA, 61 bp, Homo Sapiens
gtgtgtgctggcttgagtgcttttctaagarcattatataagcttggagaaaatgataaac

SEQ ID NO: 2244 - DNA, 61 bp, Homo Sapiens
agctcctggtgtttcaccctcactgtttcartcttcccagtgtcaaccacggatgtgaaga

SEQ ID NO: 2245 - DNA, 61 bp, Homo Sapiens
atattttctgcattattagacaagtcaatgragataaaacaaaatattaagtattttaagc

SEQ ID NO: 2246 - DNA, 61 bp, Homo Sapiens
acaggtgagaccaggtacaagtccagctggytcagggactgtgacaaggagagaagtgtga

SEQ ID NO: 2247 - DNA, 61 bp, Homo Sapiens
caaggaaatgagttttgagactggcaacttyagtcaccactggcgtttttttctgcatctg

SEQ ID NO: 2248 - DNA, 61 bp, Homo Sapiens
gcaaaggtctgggtttggagtctacacagawttctctggttctcatgtttccagtcagaag

SEQ ID NO: 2249 - DNA, 61 bp, Homo Sapiens
tgtgagaggggcctaatgcagagtgggcacrccataattatttgcaagtgactgactcagg

SEQ ID NO: 2250 - DNA, 61 bp, Homo Sapiens
ttgcctattgtctctatactgaactactgarctgtcctttatagcaatctccccctcatcc

SEQ ID NO: 2251 - DNA, 61 bp, Homo Sapiens
aaaaagaccatcatgttaggcccggtgatgmatataccatctctccaaatccttgactcca

SEQ ID NO: 2252 - DNA, 61 bp, Homo Sapiens
acggcaggggcacacatgggggctccctcakctggggatctctcaggcttttttcactctc

SEQ ID NO: 2253 - DNA, 61 bp, Homo Sapiens
cgcaacttcctaagtatgtatgcttcgttayttgttgatgggtaatctgggctagcagtta

SEQ ID NO: 2254 - DNA, 61 bp, Homo Sapiens
ttcactgactgtctttgcttcacagattccrcttttgctagatcaacaatacatcttgttt

SEQ ID NO: 2255 - DNA, 61 bp, Homo Sapiens
acactgagatcaagatccaagatcaatgaamacgacggttctcttccccactcctagccaa

SEQ ID NO: 2256 - DNA, 61 bp, Homo Sapiens
atggttaagttccagggggtttgggaaggcmtgtaaggaatatgggccgtgaggaagagga

SEQ ID NO: 2257 - DNA, 61 bp, Homo Sapiens
gatcacaatgaaatgatacatcgccccctgstcatctggaattatagtgatactaacattg

SEQ ID NO: 2258 - DNA, 61 bp, Homo Sapiens
tccaaaaggatttacttgctggcttaccaayctcttcctcatattttttttagacagaatc

SEQ ID NO: 2259 - DNA, 61 bp, Homo Sapiens
ctttccatttcaacagagggaaagaagagaytaatttgggctcaaatacactgagatgtct

SEQ ID NO: 2260 - DNA, 61 bp, Homo Sapiens
cctaattaaccttcaccgttatgcgacgctscatttcacaaaatcatactaagcaaaaaag

SEQ ID NO: 2261 - DNA, 61 bp, Homo Sapiens
gtttaatggggaccgtttcagttttacaaakatgaacggccgtgatggttgcacaaattat

SEQ ID NO: 2262 - DNA, 61 bp, Homo Sapiens
aaacttcttgaaacacttgtcttcactgacygtctttgcttcacagattccacttttgcta

SEQ ID NO: 2263 - DNA, 61 bp, Homo Sapiens
tggaatgcttaaaaaaagcactgatagagcragaaaatacataccttactcacctgctaca

SEQ ID NO: 2264 - DNA, 61 bp, Homo Sapiens
acccggagacaaggatgcattaatctacttwtccaacatctgtgccaaagagtaccctagc

SEQ ID NO: 2265 - DNA, 61 bp, Homo Sapiens
aaaaaaaaacgccagctctgattgtcaagtraatggaaaaatggggttcacgagcagctct

SEQ ID NO: 2266 - DNA, 61 bp, Homo Sapiens
atagaaaatactagagaatttaccagaaaarctgtcagaactaatatgtgaattcagtaaa

SEQ ID NO: 2267 - DNA, 61 bp, Homo Sapiens
tcccccagaaactaaaggatgactatatctyaccacattttcacacagctgactacttcca

SEQ ID NO: 2268 - DNA, 61 bp, Homo Sapiens
tgccctagaaaaaattacggaaaggtaaagkctgtccttccctgctgtgtgacagatgctt

SEQ ID NO: 2269 - DNA, 61 bp, Homo Sapiens
cacttgattaagatctgccatacagagaacrccagcaaaaagaagagagcagacttgccac

SEQ ID NO: 2270 - DNA, 61 bp, Homo Sapiens
gaaaaagttccagaacaaagaaatgctgccmatggtgagaatgcacatctcgtgggccctt

SEQ ID NO: 2271 - DNA, 61 bp, Homo Sapiens
gagatgttagctaaaggataaaaccatcacmggaagaataagttcaagagatctattgtgc

SEQ ID NO: 2272 - DNA, 61 bp, Homo Sapiens
cagaaactatatgataaatggcaatacagckttggtgatatttaaaattaaaaatgtcaga

SEQ ID NO: 2273 - DNA, 61 bp, Homo Sapiens
aggagcaaaactattagaacttcctacacaygaagagcagtcccaagcatccagggaaaga

SEQ ID NO: 2274 - DNA, 61 bp, Homo Sapiens
gcaggaaagaggatatatctcactgttttcyagcttcactctcctgtaaaatacgcattgt

SEQ ID NO: 2275 - DNA, 61 bp, Homo Sapiens
aatatagaagatataaggaaagaatgtctgmggttttctttttcagattttaaattcaaat

SEQ ID NO: 2276 - DNA, 61 bp, Homo Sapiens
tcaaataaacatttagtgagatcagtaaacrgtcagtgttcctaaaaagtacacccaaatg

SEQ ID NO: 2277 - DNA, 61 bp, Homo Sapiens
gttatttatttttggagttctgttaggttaygaaaatgggctaggcatggtggctcacact

SEQ ID NO: 2278 - DNA, 61 bp, Homo Sapiens
tttatattaccctgttccctaataactttcmgtggcttcttgttaccctcaaggtacaacg

SEQ ID NO: 2279 - DNA, 61 bp, Homo Sapiens
ttggaaagcatctaattcctcttagcacaaygtaagtaacaaaaaaaatgcatgtcttact

SEQ ID NO: 2280 - DNA, 61 bp, Homo Sapiens
caatgctattcctttcaaactaccaatgccrttttttacaaaactacacaaaaaccattct

SEQ ID NO: 2281 - DNA, 61 bp, Homo Sapiens
ttatacaaaatctattttcagtaagtaccaratgcaaattctaagtaataagaaattaatc

SEQ ID NO: 2282 - DNA, 61 bp, Homo Sapiens
aaggtgggaacctgagtggagctgctcatartatttgggaaagaagtgagatggctgcatt

SEQ ID NO: 2283 - DNA, 61 bp, Homo Sapiens
tcatcactagcatatgcattgcacatggaartttctcagttagtacttgttgaataaatga

SEQ ID NO: 2284 - DNA, 61 bp, Homo Sapiens
tcattgtattttcttccacctgcccaatctycagttctgccaggaatttataagattcttg

SEQ ID NO: 2285 - DNA, 61 bp, Homo Sapiens
agtgaatgtcatagtatcaatcaaatctacsaacattctgtaagcatgcttgactgtcact

SEQ ID NO: 2286 - DNA, 61 bp, Homo Sapiens
aaacttcaattgttttctaacatctttcatsagtatttcacattcgataatataaagtcat

SEQ ID NO: 2287 - DNA, 61 bp, Homo Sapiens
caggctgaagagcaaagcaaggacagattcrgatgggtttatgcaaagcatcacattaatg

SEQ ID NO: 2288 - DNA, 61 bp, Homo Sapiens
aggccaccaatagctgtgtgatcttaggaastcacgtaatttttttgaatctcagagtcct

SEQ ID NO: 2289 - DNA, 61 bp, Homo Sapiens
taagatgagaatttatttctttcagtttgayctcttggtatttattgattttggaacatta

SEQ ID NO: 2290 - DNA, 61 bp, Homo Sapiens
agctcatctgatcctcacaaccaaacatcamtgagttggatagtatccccatttaacagaa

SEQ ID NO: 2291 - DNA, 61 bp, Homo Sapiens
gcttaagtaagatcataactaagaagtgaaygataaaaaggagtcaggcttacaaagattt

SEQ ID NO: 2292 - DNA, 61 bp, Homo Sapiens
aacctttataatgcccttcaatggaaatttwtgtcaagtaaattcaattcaagctatgata

SEQ ID NO: 2293 - DNA, 61 bp, Homo Sapiens
cctctctgtgaccttgggctaggtgcttacmctaagattctctttcctcatctgtgaaata

SEQ ID NO: 2294 - DNA, 61 bp, Homo Sapiens
tacagtttatggaaatgaggaaaagtctcargtcaatagtaaaatttctaggaaaaaatct

SEQ ID NO: 2295 - DNA, 61 bp, Homo Sapiens
aagtccttcacaactttgccttcttttgatmaccgttttactcctctttcattttcccttg

SEQ ID NO: 2296 - DNA, 61 bp, Homo Sapiens
cctaaaccaattactttcataccaggaaaakcctttctagcaccagcaaaatcccacccat

SEQ ID NO: 2297 - DNA, 61 bp, Homo Sapiens
agaaattgtgaacttgtgttcatgaaccacrttgctttatcttagtaaaagcccatttttc

SEQ ID NO: 2298 - DNA, 61 bp, Homo Sapiens
atccttatagtatccatttgttcttgacacrgccatgcaaatgttaggggttagcgtgaag

SEQ ID NO: 2299 - DNA, 61 bp, Homo Sapiens
aagtctaatactgatagaattgattcaaaasctattctctatattgagaaaaccagagctc

SEQ ID NO: 2300 - DNA, 61 bp, Homo Sapiens
atgtagtaaatctattctgtaccttgatttsaactgccttcctacctttgcccctattcaa

SEQ ID NO: 2301 - DNA, 61 bp, Homo Sapiens
ctgaataaagcaagttgctctccttaatgtsgtgggcctcattcaattagtagaaagccta

SEQ ID NO: 2302 - DNA, 61 bp, Homo Sapiens
tttgtgtatgcaatacattgtaaagttgtcrtagaacattctttattctatgctttaatgt

SEQ ID NO: 2303 - DNA, 61 bp, Homo Sapiens
ttagcaggaggatgcataacagagcggtatsttcaataactgccaggtttctgacatgggc

SEQ ID NO: 2304 - DNA, 61 bp, Homo Sapiens
ccgtgcccagccaggtttgctatcttaagasagtaacccaatgtcttagggtgatcatttt

SEQ ID NO: 2305 - DNA, 61 bp, Homo Sapiens
gacttaagccaatagctaccaacatcacttscaattgacaagtccaatgcctaacaaagaa

SEQ ID NO: 2306 - DNA, 61 bp, Homo Sapiens
agactgaactgtcacattcagctacttctakttccctgggtgcatctcttttcacacaact

SEQ ID NO: 2307 - DNA, 61 bp, Homo Sapiens
cacttaatcatcatggcaatccttcaatgtwgttactgttatttttattttagaaatgagg

SEQ ID NO: 2308 - DNA, 61 bp, Homo Sapiens
tgctgtccaaaagaaatataacatgagcctmatatggaactttaaattttctaataactac

SEQ ID NO: 2309 - DNA, 61 bp, Homo Sapiens
cacgtctactgattaaacacattaaactttygttacaaatttcaatcaatttataaaaatt

SEQ ID NO: 2310 - DNA, 61 bp, Homo Sapiens
agtctccttccagaaagcagtcaagcttaaygaaacaaggttgtttcctgagttccgaagg

SEQ ID NO: 2311 - DNA, 61 bp, Homo Sapiens
tcaacacttccaagagcacctctttcaataytatttttcacttggccagacacatcatgaa

SEQ ID NO: 2312 - DNA, 61 bp, Homo Sapiens
gcaggtgctgaacaagtcctagaacctacaraaaatgagtcatctcttctcaaatataatt

SEQ ID NO: 2313 - DNA, 61 bp, Homo Sapiens
gatcatatcagggaaatagtggcctcatackcatttgtatcaccgttggacatcttgtaag

SEQ ID NO: 2314 - DNA, 61 bp, Homo Sapiens
gcatgcacacacactgaaacactgaggtctwtcacttttctatctgtcttaccccatcacc

SEQ ID NO: 2315 - DNA, 61 bp, Homo Sapiens
aaaattacagattgtctgatgcaactccatrtctactgactgacgaatttcaaagcataga

SEQ ID NO: 2316 - DNA, 61 bp, Homo Sapiens
caaggccaaaagctctcctttgatctttctrtgattcttctgtctttacaagtgaattttc

SEQ ID NO: 2317 - DNA, 61 bp, Homo Sapiens
ccaaatgttggtgcttctttcttcccacacrtagaacattcttcttccttctaagctaagt

SEQ ID NO: 2318 - DNA, 61 bp, Homo Sapiens
tagtcttccatgtcgcattttcacctctatmttgtgattccaaggtagatccatgccaatt

SEQ ID NO: 2319 - DNA, 61 bp, Homo Sapiens
cctatttagggtgccacgaattgagacattktgcctcagagtttcattgtttgtgacattc

SEQ ID NO: 2320 - DNA, 61 bp, Homo Sapiens
ttacaattacagggtgattggcgcaatgatrgaggcactgacaggagcaagagaaaacttc

SEQ ID NO: 2321 - DNA, 61 bp, Homo Sapiens
tttaaaagttacacttgaaataataggcaamaaacactgatccacattccaactggtaggc

SEQ ID NO: 2322 - DNA, 61 bp, Homo Sapiens
gataccaccttggagtgttatcgaggtgagmtgtgctagataaatcaatcaatacctgaaa

SEQ ID NO: 2323 - DNA, 61 bp, Homo Sapiens
ttttgaaatgaaacataaagtcaggcataayactaatctagagtactcctgcctaggatca

SEQ ID NO: 2324 - DNA, 61 bp, Homo Sapiens
gatttgttgcaaagtcttttgcttaataggmtactaaacactgaaaaagacaataattagg

SEQ ID NO: 2325 - DNA, 61 bp, Homo Sapiens
atgattaattacaaatagtagtgtataaacygcacatatcgttttatttgcttcacacaat

SEQ ID NO: 2326 - DNA, 61 bp, Homo Sapiens
taggatacttattaagatgtcactcctcgcrggattgtgtgaagcaaataaaacgatatgt

SEQ ID NO: 2327 - DNA, 61 bp, Homo Sapiens
gaggagaatatttgtatttggaagaaacagytatactttcaacttatttcagaagaaaata

SEQ ID NO: 2328 - DNA, 61 bp, Homo Sapiens
gtcctagtatgttgttaaaattgtctgttaytctaagtttataagaaggatcaatgatgta

SEQ ID NO: 2329 - DNA, 61 bp, Homo Sapiens
gacattcaaagccatcgagatgttctctgtsactctcataggtcgctaatgattatcattt

SEQ ID NO: 2330 - DNA, 61 bp, Homo Sapiens
ctaggctttctgtgcctgtagtgtaacttgyactagctgtgcatgtgacaaaggtcactgt

SEQ ID NO: 2331 - DNA, 61 bp, Homo Sapiens
caagaataagtatgtgaagatataattgcasttactgaacagaactctggttaatctggta

SEQ ID NO: 2332 - DNA, 61 bp, Homo Sapiens
caagaaacatgtttttagtgtagcaccttaygtgacaacattttactaaagtaaaatgttg

SEQ ID NO: 2333 - DNA, 61 bp, Homo Sapiens
tgtctttccccactcaacttactgctcacgwagaaagatcagtgtcagctgttggcaagat

SEQ ID NO: 2334 - DNA, 61 bp, Homo Sapiens
aggaactattcaagatagcctcgattcatgwcctgaatgtgtgtagataaatttataatat

SEQ ID NO: 2335 - DNA, 61 bp, Homo Sapiens
tgaatactttacttatggttccgtcacaacraaaagaggtaaaggacgaagaaaaaagccc

SEQ ID NO: 2336 - DNA, 61 bp, Homo Sapiens
ttcagttaacttaaattcagttgacttaagktcatacgaagaagaggttaataaaaaattg

SEQ ID NO: 2337 - DNA, 61 bp, Homo Sapiens
tttgatttggaggttcaatgaaactcacttrgaaatgtccctccagtaatatttcccctct

SEQ ID NO: 2338 - DNA, 61 bp, Homo Sapiens
taaaatagcaagtaaatattttgactgtaargctaatagttttgcattttaattgcgtttt

SEQ ID NO: 2339 - DNA, 61 bp, Homo Sapiens
cagatgctgcttagacacaattgttaccaaygttaaactctctacgtgacccttcatagtt

SEQ ID NO: 2340 - DNA, 61 bp, Homo Sapiens
ctcttgacacaccgtcacatctgagagggarcctattagaccacattttggctcagctgag

SEQ ID NO: 2341 - DNA, 61 bp, Homo Sapiens
ctgagaaacagagctgtggactaatttgccyggaatctctcatttaataagaggtagtgtt

SEQ ID NO: 2342 - DNA, 61 bp, Homo Sapiens
gagtcaattttatatttcttctttttatccrttcccatctcagattgcaacagaaaatttg

SEQ ID NO: 2343 - DNA, 61 bp, Homo Sapiens
cagggaatagctaggggaggatattactttmgaagatagcgctcttgatatagtggttcca

SEQ ID NO: 2344 - DNA, 61 bp, Homo Sapiens
ctgctttaggcacagagtagagtatgctttsgttgactaaactgagcaaaagcaagaacat

SEQ ID NO: 2345 - DNA, 61 bp, Homo Sapiens
aacatgtactgtgtaactggaagttggcttsttttgatggcatttggataactataattac

SEQ ID NO: 2346 - DNA, 61 bp, Homo Sapiens
cagaaggcaaaactctcttagtccttttttygctgctataatagcaaaccacagactggtt

SEQ ID NO: 2347 - DNA, 61 bp, Homo Sapiens
aggtcaggaaattgggcacgcttgttgactygaaagaaaagaaccaaggaaagatgaaagt

SEQ ID NO: 2348 - DNA, 61 bp, Homo Sapiens
ttaaaaagagttgcttccctctttcaagccyagattgcaacctaatggaatgtgctgagca

SEQ ID NO: 2349 - DNA, 61 bp, Homo Sapiens
ggaaccgatatgtgctttcagagttagctcrgtagggcaatttcattttctcttgatgttg

SEQ ID NO: 2350 - DNA, 61 bp, Homo Sapiens
gttccaagtaagctttttctgataaagctcyggccctgacttccagtttgtggtttcttct

SEQ ID NO: 2351 - DNA, 61 bp, Homo Sapiens
agacataattggtttagtggaaacatggttrgtccgaatgttaatcttccctcttaatatg

SEQ ID NO: 2352 - DNA, 61 bp, Homo Sapiens
tgagacagaggtgactatggaatcccaaaarcttgaggtcactgagaaaggttatatttat

SEQ ID NO: 2353 - DNA, 61 bp, Homo Sapiens
taggtttggtattccaaatgtagaaacgaasgctcagaagagttacttgtcagaaagcaag

SEQ ID NO: 2354 - DNA, 61 bp, Homo Sapiens
atagaaaatttagttttgccatgtagaattsaaaaagtgatagatggtgttacttccaatg

SEQ ID NO: 2355 - DNA, 61 bp, Homo Sapiens
tcctgaatattggaagaccacagaaaatgcraagaaaccaggctcacatttattttagtga

SEQ ID NO: 2356 - DNA, 61 bp, Homo Sapiens
tcaggaatgaactggcttgttactggttacytgcacctggtggaaaagtacactcaaggcc

SEQ ID NO: 2357 - DNA, 61 bp, Homo Sapiens
cagtggagacctgtaaccattttcctgtaayttggtacctgttagtctatcagctcagtga

SEQ ID NO: 2358 - DNA, 61 bp, Homo Sapiens
agtcacataaatttgtatgtaccattcaatyctcaagacaacctgtaaatacaactattat

SEQ ID NO: 2359 - DNA, 61 bp, Homo Sapiens
atctatttatagaagttgtcacttaagctcytaattttatcaccaaatttcaaatccaagt

SEQ ID NO: 2360 - DNA, 61 bp, Homo Sapiens
agtaatgtcttacaaactgcatctgtttatstttaaattccaaatagaatgtcatccaaat

SEQ ID NO: 2361 - DNA, 61 bp, Homo Sapiens
gcaaaataaaggtaagaacaatccacaaatkttcaactgttcatatattttaaaagcttcc

SEQ ID NO: 2362 - DNA, 61 bp, Homo Sapiens
tttcactaatgaagaaaagtattgcacattkgaaatacactaactggattgaatatgtaat

SEQ ID NO: 2363 - DNA, 61 bp, Homo Sapiens
gttgcttaatttgtggatttctgatacaatrtcttctactgagccaccatcaaagcatgct

SEQ ID NO: 2364 - DNA, 61 bp, Homo Sapiens
aatagaaattaaattctttgggatgtacagrtaagataagctatgtgaagcatagctgtta

SEQ ID NO: 2365 - DNA, 61 bp, Homo Sapiens
atgctcttcagcttaacgatgtatgtatctyggggtcttccatgtcagtagagagatatac

SEQ ID NO: 2366 - DNA, 61 bp, Homo Sapiens
atgatcactattttcttgacccctacttacratcctgggagatgtatttgggtttagcgtg

SEQ ID NO: 2367 - DNA, 61 bp, Homo Sapiens
gagatatttatcttgaggaagatttggctgktgggaggaggagacataatagcttttttca

SEQ ID NO: 2368 - DNA, 61 bp, Homo Sapiens
taatactgagattgtcctagagctagacgtragtgaatattgagatagaaagccttattaa

SEQ ID NO: 2369 - DNA, 61 bp, Homo Sapiens
cacataaatacacaatcctatagagcatttsaggaatggataatctgggacccatatttct

SEQ ID NO: 2370 - DNA, 61 bp, Homo Sapiens
gtatttaagctagatgagtctggaattagcwagaagactttttgttttttgttttccttta

SEQ ID NO: 2371 - DNA, 61 bp, Homo Sapiens
ggaggcacctttgaagatcttccagccttastaaagcattcagatacctgcagcttcagct

SEQ ID NO: 2372 - DNA, 61 bp, Homo Sapiens
atacctgcagcttcagctaacaactggttgrattttgtgagaatcaccaagccacaattga

SEQ ID NO: 2373 - DNA, 61 bp, Homo Sapiens
agaattcctttctgtttaatagtactctcarctgaactctattctttttacattttactac

SEQ ID NO: 2374 - DNA, 61 bp, Homo Sapiens
gcaatttagtcttgctccaatacactcttcrgaatcctagccttcgcccactgcctgtttc

SEQ ID NO: 2375 - DNA, 61 bp, Homo Sapiens
aataatacctgcttttctcatctcaagtggwttcagtgattgtttatgataatagaacttg

SEQ ID NO: 2376 - DNA, 61 bp, Homo Sapiens
tcaggagagaaaaaaaatacttgattggtayctcatggggctgttgtaaggaacaaatgag

SEQ ID NO: 2377 - DNA, 61 bp, Homo Sapiens
cagtatttcaaatgcctgaagcctgacaaayttacattcttaacaggcaaacacttttcca

SEQ ID NO: 2378 - DNA, 61 bp, Homo Sapiens
gttctggcagtttctgaactcttaatgataytttgatgacatccagttagatgctgaatac

SEQ ID NO: 2379 - DNA, 61 bp, Homo Sapiens
ttaccatgtgcagtacattctaataattctragctgttacatcacagaaatggctgcctgt

SEQ ID NO: 2380 - DNA, 61 bp, Homo Sapiens
cttcattaggggtatgataatgaaactgccrtattggatactctattaatgtcttgagatg

SEQ ID NO: 2381 - DNA, 61 bp, Homo Sapiens
tgagcccagatatgtgagcacatttttgccytgacaatgatttctggcttaatttaatttc

SEQ ID NO: 2382 - DNA, 61 bp, Homo Sapiens
atatatgagtctatttttctgctttaatggrtacaatagggaacacataagtgagtcattc

SEQ ID NO: 2383 - DNA, 61 bp, Homo Sapiens
gagtccatgatgtagtgtttaatgcagaagmaatttatagaaggggttgtgtaatattacc

SEQ ID NO: 2384 - DNA, 61 bp, Homo Sapiens
atcctttcctgcaaacatctgtttaatatcrggagctatggctgctttcatgaaagaaagt

SEQ ID NO: 2385 - DNA, 61 bp, Homo Sapiens
aaatacatatatccttctataggacagttayaaaacaaacaccaatgtaaatcaccatcca

SEQ ID NO: 2386 - DNA, 61 bp, Homo Sapiens
aggagttttaacctctctcttccgtactatraaacaattacactggttaattttcatatat

SEQ ID NO: 2387 - DNA, 61 bp, Homo Sapiens
agccacaagtatagccgcactttttgccagwtgattggtaactgtgaataatatatgcaca

SEQ ID NO: 2388 - DNA, 61 bp, Homo Sapiens
atgaaagtagctgttatactttgtggatctyaaatgctgtgtaaatagttgctaccttaat

SEQ ID NO: 2389 - DNA, 61 bp, Homo Sapiens
agggtagaaagcttatttaaagacatactawcatgaaccacataatgatgttttggtcaac

SEQ ID NO: 2390 - DNA, 61 bp, Homo Sapiens
acatgtgttgaagaatttatgcagtgtcctyagattctttcattaagagaagcaagaataa

SEQ ID NO: 2391 - DNA, 61 bp, Homo Sapiens
tgtctttttctatttcgtttccccaaaggcrtcaataaaaccaggcaattagtgtttcttc

SEQ ID NO: 2392 - DNA, 61 bp, Homo Sapiens
aatgatttgtttcactgtgtcttgccactcstttgataagcagtctctctcaagaattggg

SEQ ID NO: 2393 - DNA, 61 bp, Homo Sapiens
tttcacagaagcacatgataattacaaggamgctctaagccagaagttatcaccaaagccc

SEQ ID NO: 2394 - DNA, 61 bp, Homo Sapiens
gtcagatgggtcagaacagagtgagtcacayaaaccaccatgcagttcccaggtgataaga

SEQ ID NO: 2395 - DNA, 61 bp, Homo Sapiens
tgtaaaaaaggaaaaaaaaaaacaactacaycttttatttcagacaaatctccttgaattt

SEQ ID NO: 2396 - DNA, 61 bp, Homo Sapiens
atttaatctgaattgagaaactattggttgrctattaggagaaagagcttagaaatgggcc

SEQ ID NO: 2397 - DNA, 61 bp, Homo Sapiens
aaaataataatcacctactttataagtagcrgtcaaagggtaagtcgaaatttcaggttaa

SEQ ID NO: 2398 - DNA, 61 bp, Homo Sapiens
gaactctgttctgtggcagaatctcctactrttaaccctgctgaggcagctgtcactgaac

SEQ ID NO: 2399 - DNA, 61 bp, Homo Sapiens
cactggaattatttttcttttgtcaagccartaatctcccaggcatggtggtgtgcatctg

SEQ ID NO: 2400 - DNA, 61 bp, Homo Sapiens
aagacagccgcataagccatcggcaggaatyaaggtacaggaagggcttcctggggtactc

SEQ ID NO: 2401 - DNA, 61 bp, Homo Sapiens
gggagggaaggagggcgagaggaacgaagcrattccattaggaggctgtttactcctagat

SEQ ID NO: 2402 - DNA, 61 bp, Homo Sapiens
aagtcctcttattgggcttatggacatgtcmgcttatggacggaatcctgactttccctcg

SEQ ID NO: 2403 - DNA, 61 bp, Homo Sapiens
ataagctttaagagcctggtcatgcaaagakaattcagtgagatgaaagattgtttatttc

SEQ ID NO: 2404 - DNA, 61 bp, Homo Sapiens
cctcctatagtcaccttgcaagtccaggacrgaaccagaattgacatctgagcctcctacc

SEQ ID NO: 2405 - DNA, 61 bp, Homo Sapiens
tgtccctgggcagcgtgatcatgggaatacygcttaacctcaaatccttggctttctctgt

SEQ ID NO: 2406 - DNA, 61 bp, Homo Sapiens
tgtgaacctgcagttggtggtaccagagccrtctggacctgcgctttcccaagacagccct

SEQ ID NO: 2407 - DNA, 61 bp, Homo Sapiens
ttcatgtcttacgggggaccctcggacacaygatggggccttgaatcaggttgctgtttgg

SEQ ID NO: 2408 - DNA, 61 bp, Homo Sapiens
ggggccttgtcggctattgctgaggctttgktttttactctgagtcaactgggaggcattg

SEQ ID NO: 2409 - DNA, 61 bp, Homo Sapiens
gctctgggatcttctccaggcggtgctcagyggcaccctgcaggtgacaggaagcgatgag

SEQ ID NO: 2410 - DNA, 61 bp, Homo Sapiens
ggagggaagaggagacaggtgataccgcctragaacacagatccccaaagagtagtccctt

SEQ ID NO: 2411 - DNA, 61 bp, Homo Sapiens
ttttttatccactgaacatcttggtagtaarttaggttgattctttatgaacattttttta

SEQ ID NO: 2412 - DNA, 61 bp, Homo Sapiens
tgctgaataagctcctagaagaccatctttytcatttaagcacaaacttcaattctatcta

SEQ ID NO: 2413 - DNA, 61 bp, Homo Sapiens
gtctagagtctgtttgcaaagaaacatgagkaatctcccaatactggccagaattctctct

SEQ ID NO: 2414 - DNA, 61 bp, Homo Sapiens
agaaaatgtgactaagaggcctgaaaatttraggatagcagtatactcaatgaccagatca

SEQ ID NO: 2415 - DNA, 61 bp, Homo Sapiens
aagggcaggacactggaacagatgggtgtargaagtgaagtagaaacacattgacaagagt

SEQ ID NO: 2416 - DNA, 61 bp, Homo Sapiens
tagtagtaattaatcattgtgattatttatyatctttgctctgtttacagaatttcaatat

SEQ ID NO: 2417 - DNA, 61 bp, Homo Sapiens
ccatagttgatttttttcttctcaaccatgytgcaagcataatacttcaagttataattac

SEQ ID NO: 2418 - DNA, 61 bp, Homo Sapiens
ccccatctcaagtgtgatcttcccgtgatcygccagaacttcagcctgctttgatgctttg

SEQ ID NO: 2419 - DNA, 61 bp, Homo Sapiens
actttcaaagactattaatgataaatgaagrgtttcgtaatatagtattaagtgaaaacag

SEQ ID NO: 2420 - DNA, 61 bp, Homo Sapiens
agctgccttgatcaattacactagactcacmgaatatgccaaaatagaaggtcagtgcagt

SEQ ID NO: 2421 - DNA, 61 bp, Homo Sapiens
gaagacaggagaagctcctcaacacagggawagaattagtgagtaagagtcctcaggggat

SEQ ID NO: 2422 - DNA, 61 bp, Homo Sapiens
ttatctgctactcttgtcttatttcatagcmattgccatagctggagacttcattatctca

SEQ ID NO: 2423 - DNA, 61 bp, Homo Sapiens
caatcactgacttaataacttctgtccatgytacaccatcaaatgtgcacataaatttatt

SEQ ID NO: 2424 - DNA, 61 bp, Homo Sapiens
gacaaatcattttaatctctctgtgctttcyttacaagagtattgtaaaaaaataataata

SEQ ID NO: 2425 - DNA, 61 bp, Homo Sapiens
agccacctaagtggcagaaaggatttgagckctggcaatataggtacaacttctgcaccac

SEQ ID NO: 2426 - DNA, 61 bp, Homo Sapiens
tgtattaaaggccaaataatatattacattyggctgactttgtatatttttccatagccta

SEQ ID NO: 2427 - DNA, 61 bp, Homo Sapiens
gtgcatttcttgtcttaaattaggggatacrttggataaatcctcactggtactgtgagtt

SEQ ID NO: 2428 - DNA, 61 bp, Homo Sapiens
taacacctgataatttgcaagaattgttggraaagatcaatacacagattcaggagaaata

SEQ ID NO: 2429 - DNA, 61 bp, Homo Sapiens
agagttttggaaaacatcgaacctaattagytaaaaatgtacaatttgttttaagcacaat

SEQ ID NO: 2430 - DNA, 61 bp, Homo Sapiens
tcaatttctagtccgtggttggttgatccgytgaagtaagtcatctgagtggcctcgacct

SEQ ID NO: 2431 - DNA, 61 bp, Homo Sapiens
ctcattagtatttcctttcattttcaaaagygtccctctttggctgataaattaaacaagc

SEQ ID NO: 2432 - DNA, 61 bp, Homo Sapiens
tagtgtacccttaattgtatactctggttayctacataaattgcatgacttacaagcactg

SEQ ID NO: 2433 - DNA, 61 bp, Homo Sapiens
atttaaatatctaaaattgctcaataaagcrcgaaatgtcttgataacaatgatctttcat

SEQ ID NO: 2434 - DNA, 61 bp, Homo Sapiens
tactcctgccctgcagaccccacacaactcytgagaggaccaaattttaaaaatgcatgtg

SEQ ID NO: 2435 - DNA, 61 bp, Homo Sapiens
tttttcaatcttcttacctgttaccactctycttattttccatagagctctgattgtcatc

SEQ ID NO: 2436 - DNA, 61 bp, Homo Sapiens
gtttctacattctgttgagaaggatagtcaygtggtttagcaaaatgaaagcctgcagcta

SEQ ID NO: 2437 - DNA, 61 bp, Homo Sapiens
ttctactttgatgcctttaatggcagttacmgtataccttttgctaagagccgaaataggt

SEQ ID NO: 2438 - DNA, 61 bp, Homo Sapiens
agaatttataggggaaacagtaccatttctrcatgactttcatttgcatttgtttgttatt

SEQ ID NO: 2439 - DNA, 61 bp, Homo Sapiens
attaacttcattgatgtcctgggttcagatracctattttgcccccacccagatcaactgg

SEQ ID NO: 2440 - DNA, 61 bp, Homo Sapiens
tgtttacccccctttcttccttttcatccawtaaaaccctactttactcaccattcaaact

SEQ ID NO: 2441 - DNA, 61 bp, Homo Sapiens
gtggcctagcagataaagttcaagtggagakaaagtgatttcttttatgtaaagttagaaa

SEQ ID NO: 2442 - DNA, 61 bp, Homo Sapiens
tagtaggtgatacagacaacaaattgacagragctaatgaaagcggtacactggaaatagt

SEQ ID NO: 2443 - DNA, 61 bp, Homo Sapiens
attatgtaattaagtcttctatatccattcrgagcaacagcaaatatctctaagtcattta

SEQ ID NO: 2444 - DNA, 61 bp, Homo Sapiens
taagctctgggtacaaaagactcatggctcrgcacaaatggggccttttcctacaccactc

SEQ ID NO: 2445 - DNA, 61 bp, Homo Sapiens
actataatggtctacatttatatagtattgktctgagagatcccaaaggacctttccaaac

SEQ ID NO: 2446 - DNA, 61 bp, Homo Sapiens
aaaggatacaactgattggcagtttaaaaastcatgttcccatataaaggtattatagctt

SEQ ID NO: 2447 - DNA, 61 bp, Homo Sapiens
tttgctgccccgacagacgacagggactccrcaattcttaggtgactgttgccttcatcag

SEQ ID NO: 2448 - DNA, 61 bp, Homo Sapiens
ccagggccaaggtcttaagtgggattcaagmaaagtaataaatccataatgaatctaaaag

SEQ ID NO: 2449 - DNA, 61 bp, Homo Sapiens
atatatgattcataagatgtcttacgtttgycggttctaaacatcctttatattttatcat

SEQ ID NO: 2450 - DNA, 61 bp, Homo Sapiens
aaaaaatgacataaatagattctgatgttgyttcatttctgcagaagggtgtttttatatt

SEQ ID NO: 2451 - DNA, 61 bp, Homo Sapiens
acaaaaatactagaagaaaatctagggaaawctcttcaggacaaaactcttctagacaatg

SEQ ID NO: 2452 - DNA, 61 bp, Homo Sapiens
gtttttccttatacatctttgtcttccccgrcacccaaatacagcctggtgtaaactacca

SEQ ID NO: 2453 - DNA, 61 bp, Homo Sapiens
cactctcttccagtttctgctaatgctactrctattgcttactacattatccaagttggaa

SEQ ID NO: 2454 - DNA, 61 bp, Homo Sapiens
agagcttaacataaatcactaagaaaaatcygtagactgtgagaatataaaaatcgctgtg

SEQ ID NO: 2455 - DNA, 61 bp, Homo Sapiens
ttgtaattgattggtcaggtattttatagcraacttctatgtagaatataggattagataa

SEQ ID NO: 2456 - DNA, 61 bp, Homo Sapiens
aaggacttatttacagatgcagtgaaggaasacgtttgaaatgctccaattcttcaagttg

SEQ ID NO: 2457 - DNA, 61 bp, Homo Sapiens
gcaggtatcccacattctttctctggtatcaktattctctgtgcttgtacatgagaccagt

SEQ ID NO: 2458 - DNA, 61 bp, Homo Sapiens
gaggttagttgtggaattcgatagtccattytgtatttgttccatgtgaaaagggccttat

SEQ ID NO: 2459 - DNA, 61 bp, Homo Sapiens
gtattaaagagagtgttctttttactaaagktatcgtctcttggttaattacttctgtttt

SEQ ID NO: 2460 - DNA, 61 bp, Homo Sapiens
taaatcattcttatattcttttctagctaamggtcaatatcccccaccagtaggctgacac

SEQ ID NO: 2461 - DNA, 61 bp, Homo Sapiens
taatgacatttcagtagtccttatggggtcwcaattgctctatttttttttttattttaaa

SEQ ID NO: 2462 - DNA, 61 bp, Homo Sapiens
tggggatttagcctacagaatattttgtcamccagttaagaaacatagtacccgatgggta

SEQ ID NO: 2463 - DNA, 61 bp, Homo Sapiens
tatggtaaatacgtaaaccagtgacattgtygtttgttattcgtatctggtattatcaact

SEQ ID NO: 2464 - DNA, 61 bp, Homo Sapiens
gagaactgctgtttattcactgattaagcayttgctgtgtaccaactacttttcatgtctt

SEQ ID NO: 2465 - DNA, 61 bp, Homo Sapiens
gtgtaatactttcctaagccctgtgcagtgyattttgtttctagttttccactttgtactt

SEQ ID NO: 2466 - DNA, 61 bp, Homo Sapiens
aaaagagactatcacaggaaagctatctaaraggaaacaaattagctcccatccaattcca

SEQ ID NO: 2467 - DNA, 61 bp, Homo Sapiens
gttttacacaaactaaagctcttcctttttkattaggatagttagtttcaagtgacataaa

SEQ ID NO: 2468 - DNA, 61 bp, Homo Sapiens
actggggaaggaggaagggagcaggaagacrttgcactctgattttctcccatgtgatcct

SEQ ID NO: 2469 - DNA, 61 bp, Homo Sapiens
tgtgctaaatagcacagactagacactaggractctggtggcttctgaagcccttcaggtt

SEQ ID NO: 2470 - DNA, 61 bp, Homo Sapiens
tcacagtctaaattggacgacggcactttamtttggaccagtcttgtccaaggttcatttg

SEQ ID NO: 2471 - DNA, 61 bp, Homo Sapiens
tctcttaaatttaatagtgataaaaagctarccctgattttcctaggggccagagtaaatt

SEQ ID NO: 2472 - DNA, 61 bp, Homo Sapiens
ttgtttcctggaaaatggaaataatatcagyaatgctgccctggccaggcacggtggctca

SEQ ID NO: 2473 - DNA, 61 bp, Homo Sapiens
ttttttgctttcttttgaaaatgtgctatcygtattgattttctcaaaatgtagtgttgaa

SEQ ID NO: 2474 - DNA, 61 bp, Homo Sapiens
aattcatatatctgtctctctcctgcaagawtctacctgagaccatgccactagcttttaa

SEQ ID NO: 2475 - DNA, 61 bp, Homo Sapiens
taaggggccatataaatcatagaatttaaamcacgttggagtaagtactgaaggaaaaccc

SEQ ID NO: 2476 - DNA, 61 bp, Homo Sapiens
aatttgctttgagcactgggttagtgaaaamaagctcatgggttacagggccaatagactc

SEQ ID NO: 2477 - DNA, 61 bp, Homo Sapiens
aaacaaacaaaaaagagtattccctcatctyctccagccacttacaatcaaccttcaaaag

SEQ ID NO: 2478 - DNA, 61 bp, Homo Sapiens
tcattaatttccgtgtcttggaaccacctcyatagacgctaaggacaaacaaagatgaatt

SEQ ID NO: 2479 - DNA, 61 bp, Homo Sapiens
tgtatacaaagcataatgattggaaaggacraaacaaaattctttgtagatgagattgcct

SEQ ID NO: 2480 - DNA, 61 bp, Homo Sapiens
agaaaaacaagaatcatctgaacttggcttygaagaataaagaggagcttattaggtaagt

SEQ ID NO: 2481 - DNA, 61 bp, Homo Sapiens
ccacttaataagagatcttgaaaatcccccrtcctccagtgtggatttaatgcattcttgt

SEQ ID NO: 2482 - DNA, 61 bp, Homo Sapiens
gttgaacttcatgtaaatgtaaacttacagyatgtatccttttgttctggcatcttttgct

SEQ ID NO: 2483 - DNA, 61 bp, Homo Sapiens
gtgggtgtcacccatacagaattggagaaarggttatattctgcttttgctaatgatttat

SEQ ID NO: 2484 - DNA, 61 bp, Homo Sapiens
atacctatacagctattagtcgtggtggtaygtgataaaaaactctcctgaattgcacagc

SEQ ID NO: 2485 - DNA, 61 bp, Homo Sapiens
tggcagactgacataactggatgtgactatkgttatagctggtgggacagactcctatcgc

SEQ ID NO: 2486 - DNA, 61 bp, Homo Sapiens
ataagttaaaatgagaaggctacaaaacatrtacatatatgtgtgggtatgaatataatta

SEQ ID NO: 2487 - DNA, 61 bp, Homo Sapiens
ttggagaatattatcacttactgtactgtcrcaaatttcagataagttaacattcctgaat

SEQ ID NO: 2488 - DNA, 61 bp, Homo Sapiens
agaaaagggatagactccacctcttgatgaraggaaagacccaattttattgtaaaaggca

SEQ ID NO: 2489 - DNA, 61 bp, Homo Sapiens
aagggttgtgatgatacgcaataataggaayttacgtactttgttattgatagtataaact

SEQ ID NO: 2490 - DNA, 61 bp, Homo Sapiens
cttttagaacggtgctgccatgagttatgaytaaccgagaaaaatgtattctatagccaaa

SEQ ID NO: 2491 - DNA, 61 bp, Homo Sapiens
cagtagattgcaattagagtttacttgattwggcaattattaaaaaatgaacatttttttc

SEQ ID NO: 2492 - DNA, 61 bp, Homo Sapiens
tttttatttgtgtttttctgttattgccaamtttaaaatgtactcgttttgattaagctag

SEQ ID NO: 2493 - DNA, 61 bp, Homo Sapiens
aatccttttcaaatgtaaatcagattatgtyattcctgtgttcaaatcccttccatagcgt

SEQ ID NO: 2494 - DNA, 61 bp, Homo Sapiens
gtgagtctgtattcaattttgctcagagaayatttgaagcactcaatatttaatttcttat

SEQ ID NO: 2495 - DNA, 61 bp, Homo Sapiens
ttaatccattcaacaaccatttattaaaccsttacatttgtgccagaaccttctagacata

SEQ ID NO: 2496 - DNA, 61 bp, Homo Sapiens
catggcagcctcagtttcctggctcagtcartaatcccacctcagcctcctaagtagctga

SEQ ID NO: 2497 - DNA, 61 bp, Homo Sapiens
ctgaaatcactcagtgcggcaatgataataytgatcttggacctgattctcgattctccct

SEQ ID NO: 2498 - DNA, 61 bp, Homo Sapiens
tccttctaaagtgaccagatttaaagatcargaccagtcatttggagatgaaatgaagaat

SEQ ID NO: 2499 - DNA, 61 bp, Homo Sapiens
ttgagaattttgagttacccccttagccatytgatatcatgcagtagagaagagccatcct

SEQ ID NO: 2500 - DNA, 61 bp, Homo Sapiens
acacactgtggtgttatatttgttcaacagyctccaatcagagaatctgagccttcaataa

SEQ ID NO: 2501 - DNA, 61 bp, Homo Sapiens
aggtaaagagattctaacctgctttctctaygtaagactaacctcaccctggccatgttaa

SEQ ID NO: 2502 - DNA, 61 bp, Homo Sapiens
aaatcatccctgccatttttcctattcaaayatgttctggtatctactaacacaactgtat

SEQ ID NO: 2503 - DNA, 61 bp, Homo Sapiens
cgtcgcccaaatggtgagcattgtacgcaayaggtgacctttcaatacttcctccccgcaa

SEQ ID NO: 2504 - DNA, 61 bp, Homo Sapiens
caaaggcagcctcacacttttctgctcagtrttcagttgacacctgcccttgttttgcttc

SEQ ID NO: 2505 - DNA, 61 bp, Homo Sapiens
aatgaacaattttacatttttgcgaaatcartgaccacattcaaagcaagaagaacgaagt

SEQ ID NO: 2506 - DNA, 61 bp, Homo Sapiens
ccagtgagctgagatttgcagttgcttattstgtattctgtgggtttgaactgtgtaagta

SEQ ID NO: 2507 - DNA, 61 bp, Homo Sapiens
gtgcactttggaagttcactgcatttaatcrattcagaggatttcttttttttttaatttt

SEQ ID NO: 2508 - DNA, 61 bp, Homo Sapiens
attttctcggtatgagcagtcattttctctyggtgacatgttgcgtactttgtttcagaac

SEQ ID NO: 2509 - DNA, 61 bp, Homo Sapiens
ggtaaatctcttcttaaattaaaacacagaytatgttacagcaagtcattaagagtcataa

SEQ ID NO: 2510 - DNA, 61 bp, Homo Sapiens
agtattttttttcataagtggcatataaatstcattcaatgaaatggggaaatcacgttga

SEQ ID NO: 2511 - DNA, 61 bp, Homo Sapiens
gctatttgtggtaggaggttaaccatggacrtacccaaatcagaccttttaggagtgacta

SEQ ID NO: 2512 - DNA, 61 bp, Homo Sapiens
gcgctccacccccagggccagtgctaatccygcagagctgcccagcggcctctcaggcagc

SEQ ID NO: 2513 - DNA, 61 bp, Homo Sapiens
accggcaatgcttgtctaagtgtgaagcttyctgagaatgtgttcgctcaaacccactgtc

SEQ ID NO: 2514 - DNA, 61 bp, Homo Sapiens
tggagccacagcgccgacctcttcagccgcrattcctgctcaggagtgacaggaggcccca

SEQ ID NO: 2515 - DNA, 61 bp, Homo Sapiens
tggcgtgacgggccgagtggtccctgggcayctgaatgtcctcaccccctattttcttctt

SEQ ID NO: 2516 - DNA, 61 bp, Homo Sapiens
ttttcttcattcagtctacggtcaatgggcmtttaggtctctgctgctgtgaatagttctg

SEQ ID NO: 2517 - DNA, 61 bp, Homo Sapiens
gagggaaggagctcggtgagcttcgcatgcyaatgtattatttaggctttgtggtttcatc

SEQ ID NO: 2518 - DNA, 61 bp, Homo Sapiens
aataataataataataataacaaatttgcawcgactgagctcttccagcacacaaaggcac

SEQ ID NO: 2519 - DNA, 61 bp, Homo Sapiens
gctgcttccaaaaccaaacattctcttactrtgtgatccagtgattacactccttggtact

SEQ ID NO: 2520 - DNA, 61 bp, Homo Sapiens
actaatatccacaggctgagctcttttttcmagtgtgattccagtcagcttttcaaccaaa

SEQ ID NO: 2521 - DNA, 61 bp, Homo Sapiens
ctgaacacaaagcctcaggagtgataaagcygtcacggagtaaaacgcaccatcctctcct

SEQ ID NO: 2522 - DNA, 61 bp, Homo Sapiens
accagggatgatggaaggtatttgtgcaaarattcaggaggagatggtctgatctggtggg

SEQ ID NO: 2523 - DNA, 61 bp, Homo Sapiens
ctaaaggcacaagttacataaagaagtgccrccaatgccaacggtccccactcccgctatg

SEQ ID NO: 2524 - DNA, 61 bp, Homo Sapiens
gcaacgactgagctcttccagcacacaaagrcactgtactaaatgcgttatctgcatgaac

SEQ ID NO: 2525 - DNA, 61 bp, Homo Sapiens
catttctgatggatattcaaaaccagaactsctgatgttttcttcctgcacttgccaacag

SEQ ID NO: 2526 - DNA, 61 bp, Homo Sapiens
acaggttataacagcttgcattgcattcccsctaatttgagaatttctatgtcctcatcaa

SEQ ID NO: 2527 - DNA, 61 bp, Homo Sapiens
accagcctggctgctggaaccaggccctgcragaacacggatgacaacacagatgcacgga

SEQ ID NO: 2528 - DNA, 61 bp, Homo Sapiens
ctggtattggttttgtgcttgactctgaccstcttgccatcttttgtaaggttctgtgttt

SEQ ID NO: 2529 - DNA, 61 bp, Homo Sapiens
agccactgcacactcctgctgctctccagakataaagcgaggagagggtgacgatagccaa

SEQ ID NO: 2530 - DNA, 61 bp, Homo Sapiens
agcaatatgttaagatttgtttatctgatcraaacatttccgtctaatagatggtcatttt

SEQ ID NO: 2531 - DNA, 61 bp, Homo Sapiens
gcaaaatctaaatcagcactacaatgagctrtcatatcaaacttgttaggatacctattat

SEQ ID NO: 2532 - DNA, 61 bp, Homo Sapiens
aaaaaaaaaatcaaatatcatctgtttctayaaatcaaggcctgaatatgtgtatttacat

SEQ ID NO: 2533 - DNA, 61 bp, Homo Sapiens
acgcatgccacatgcacacccctaacttaargcctagctccaagtttctgtcacaaccaag

SEQ ID NO: 2534 - DNA, 61 bp, Homo Sapiens
aaaattagtttgtcaaaatacacacacagtygagtcaatctctttcctcacaaaaatctac

SEQ ID NO: 2535 - DNA, 61 bp, Homo Sapiens
gctttgtttgaatcccaaaggcccacatcamgtggacaggactgaccggctcctgcgtggc

SEQ ID NO: 2536 - DNA, 61 bp, Homo Sapiens
atgaagtttttgttttgctaaggtagctttscttatggtagaaatttacatgtggattttc

SEQ ID NO: 2537 - DNA, 61 bp, Homo Sapiens
cagtttaaacaaaaactgcccaatgtctccmacaggcaattgtgtagcaacaacagtcaca

SEQ ID NO: 2538 - DNA, 61 bp, Homo Sapiens
acatattttgatccgattctagagctagcastcgctgtgttgaaagtgatggcggtgatgt

SEQ ID NO: 2539 - DNA, 61 bp, Homo Sapiens
gtaggttttaatacagttgaatgctctcttytttctccaaaggctttcctttcttagctcc

SEQ ID NO: 2540 - DNA, 61 bp, Homo Sapiens
aaaagcatatgaataccatttatgataaacmacaaagtctctggatgggtaaatgcctcat

SEQ ID NO: 2541 - DNA, 61 bp, Homo Sapiens
tcctctaacatacctgaagaatttgtttacyttaaagtcgactttgaaatccaaagtgttg

SEQ ID NO: 2542 - DNA, 61 bp, Homo Sapiens
ggatgcctcccaataaaggaactttcctcasagatcttgtagagttggtgaagagaatcga

SEQ ID NO: 2543 - DNA, 61 bp, Homo Sapiens
acagaaaaaagtttcaggctacaatcctaawcccagtgtttataatctacatttcctgcac

SEQ ID NO: 2544 - DNA, 61 bp, Homo Sapiens
aagaattagataatctatgaaagatgtgacwagcctcatcgtgctcactaaccatccatct

SEQ ID NO: 2545 - DNA, 61 bp, Homo Sapiens
tcctctgtgggaaaatgccagggctgggtaygcatagtccatgttgcagattcacatatga

SEQ ID NO: 2546 - DNA, 61 bp, Homo Sapiens
tcctctcagtctacagtccgtgtctttgttyccgtggactgaatgtctagcagagccttct

SEQ ID NO: 2547 - DNA, 61 bp, Homo Sapiens
acctaccaccgtgtatgtactagatagaacractgtccttcaactttatccccgaatgaac

SEQ ID NO: 2548 - DNA, 61 bp, Homo Sapiens
cgctgtgaaggtgcagtccctgccacccccygctcttctcctttgaaatcacacatctatc

SEQ ID NO: 2549 - DNA, 61 bp, Homo Sapiens
gaagatgagatattagaattcccagtatagktgtgtgtatattcatatgtttgtatgtata

SEQ ID NO: 2550 - DNA, 61 bp, Homo Sapiens
tttgtcagtatttcatctcaacaatcagcargtcctgttgtcaaacaccaatctttactcc

SEQ ID NO: 2551 - DNA, 61 bp, Homo Sapiens
aaagagtgtagccttggggacgtggaagccyagagcatttggaagacgcaaacaagggaga

SEQ ID NO: 2552 - DNA, 61 bp, Homo Sapiens
gcccggccaagatttattttaaatctgtgaygataatgcgacagaactgggtagaacactt

SEQ ID NO: 2553 - DNA, 61 bp, Homo Sapiens
acagctcacccttaccttccctgtcttccastaaagtcctcgtattacactgatattcaaa

SEQ ID NO: 2554 - DNA, 61 bp, Homo Sapiens
atctttcaaaggaagaaataaacttgcaaakaaatattgcaggtaaagtagtcacccctga

SEQ ID NO: 2555 - DNA, 61 bp, Homo Sapiens
ttaaggtagattaagccatcgattgtatcawagagaaagtgtgaaaaactacttttagaaa

SEQ ID NO: 2556 - DNA, 61 bp, Homo Sapiens
gttgagagtgcaaagtacttctgaaaacatytgtggaaagattagttggactccacttttg

SEQ ID NO: 2557 - DNA, 61 bp, Homo Sapiens
gagatggctccaaaatgagattctacaactkagccacttacaaaaagctatcctgttgata

SEQ ID NO: 2558 - DNA, 61 bp, Homo Sapiens
caaaataagtatgctctatttgttccttcamatctctccaggcctccaggcttaggaaagc

SEQ ID NO: 2559 - DNA, 61 bp, Homo Sapiens
acaagcaactatcagcatatgcaagctattrtttgttttgcaccctatttgagaaactttc

SEQ ID NO: 2560 - DNA, 61 bp, Homo Sapiens
tatacatgctatgatctaaagatgggttcartgtagaaaattgagactaaaatctttaagt

SEQ ID NO: 2561 - DNA, 61 bp, Homo Sapiens
tttgttttagtaagaccaaagataggtcaasttaaacagatatacccgttttattagtgat

SEQ ID NO: 2562 - DNA, 61 bp, Homo Sapiens
tgtttctagatgctgtatctagaactttttygggttgactctgttttgcacaccataacta

SEQ ID NO: 2563 - DNA, 61 bp, Homo Sapiens
tgtctgacttgggcattaatgagatgaagaygagactgtaggtcagatgatgactgttttt

SEQ ID NO: 2564 - DNA, 61 bp, Homo Sapiens
ctgcagtattttggcctttcaggaaaagatstgctcaaagaccaattgaacattcttttct

SEQ ID NO: 2565 - DNA, 61 bp, Homo Sapiens
tcttctgtgagaataaagtccttggccaacrtaaggttttgtttgggttttaatattaaca

SEQ ID NO: 2566 - DNA, 61 bp, Homo Sapiens
agccaagataatatttaaaaagtttcattcygggaggcttggaactatagagatagactcc

SEQ ID NO: 2567 - DNA, 61 bp, Homo Sapiens
cacgtccagagtcccgagctgctgccgtctraaacgcagggctgctacgctgccatggctg

SEQ ID NO: 2568 - DNA, 61 bp, Homo Sapiens
gtcttaagatgcactttcccatctcaacaaygatacaggacgtgtcttacagggctgtagt

SEQ ID NO: 2569 - DNA, 61 bp, Homo Sapiens
ccctttaaagtcgctccttggcctgctaacygtcttaagatgcactttcccatctcaacaa

SEQ ID NO: 2570 - DNA, 61 bp, Homo Sapiens
aggcagagctcaccctttaaagtcgctcctyggcctgctaactgtcttaagatgcactttc

SEQ ID NO: 2571 - DNA, 61 bp, Homo Sapiens
accgcggaaccctctttgccgaccagccagygatgtttgtctcgcctgccagcagcccccc

SEQ ID NO: 2572 - DNA, 61 bp, Homo Sapiens
acctctcatccaacacagaaaccgctaaaaycaggcagaagctgtctgcagagatgttgca

SEQ ID NO: 2573 - DNA, 61 bp, Homo Sapiens
aggtgctctaaacaaccaccaaatgcatacrgcaaccaggcaaatgcctgatagaggaaag

SEQ ID NO: 2574 - DNA, 61 bp, Homo Sapiens
tccacaccaggccaacaaatccctctgttaygaaccagatagtaaacatcgtaggctttga

SEQ ID NO: 2575 - DNA, 61 bp, Homo Sapiens
aatgctttcaagatttaaagaatccggaatkgttacagttagtcttaggtctgggttccat

SEQ ID NO: 2576 - DNA, 61 bp, Homo Sapiens
ccccagtagaaattataatttaagccacaawgactgtcagaagaatgctccgttttaatgt

SEQ ID NO: 2577 - DNA, 61 bp, Homo Sapiens
aacagacatggctgtcagcagttttggagaygcaggtaattagtcctgctccagctcctgc

SEQ ID NO: 2578 - DNA, 61 bp, Homo Sapiens
ttgccaaccaaatggatataaaatgatatasagattttgactgccatttccctaatccttc

SEQ ID NO: 2579 - DNA, 61 bp, Homo Sapiens
aagcaggatttgggaaagagagaggtctagstgtgatacagtgtctgtaaaggccttaaca

SEQ ID NO: 2580 - DNA, 61 bp, Homo Sapiens
taaataataaagtgcaaaaccaattcttttyggaggtaacatgcttttttattgtggtaaa

SEQ ID NO: 2581 - DNA, 61 bp, Homo Sapiens
cctagatcatgattctagaccaaactccatyccttcctactgtgtgacttgatcaaatccc

SEQ ID NO: 2582 - DNA, 61 bp, Homo Sapiens
tcccaggacatctatttatttaggacatagmatttgtagccataaaagcaaatcatattaa

SEQ ID NO: 2583 - DNA, 61 bp, Homo Sapiens
gctccatttacacttgtaacaggcaactttsctagattaatcttgtccaaactaatgcaac

SEQ ID NO: 2584 - DNA, 61 bp, Homo Sapiens
gggaagattgagaatgtgatacttcacttgytgcctacagcatataaagttcaagctgaca

SEQ ID NO: 2585 - DNA, 61 bp, Homo Sapiens
ataaattcaaaattggaagttttaatgtgastggtaacctactttgaaattattgttgcta

SEQ ID NO: 2586 - DNA, 61 bp, Homo Sapiens
tatttcattactggcaaaggtgttgtgaagracctagcacgttatacaaacttggcactga

SEQ ID NO: 2587 - DNA, 61 bp, Homo Sapiens
ttgtcttccatttctgcagttgaccagatgytaattgtggccatattctaggcttaaactg

SEQ ID NO: 2588 - DNA, 61 bp, Homo Sapiens
tattgtgaaaacaaagtaaagtacaaaagartgtttgcagtatgctacctctcatgtgaaa

SEQ ID NO: 2589 - DNA, 61 bp, Homo Sapiens
gttctttggtatttctcagttggtgattackcaattggtctttagatacatttcttgttat

SEQ ID NO: 2590 - DNA, 61 bp, Homo Sapiens
cttaggaagcacaagcgaagggcctagcatmagaaggaaacctctttaaacttttgtctag

SEQ ID NO: 2591 - DNA, 61 bp, Homo Sapiens
aaaatgttatttaagactattgcaaaagagrtcaagattattgcaataaagagaaagattg

SEQ ID NO: 2592 - DNA, 61 bp, Homo Sapiens
aaatagaactttgtctagaattccttactgkgtttgaatggagacctacctacatccacaa

SEQ ID NO: 2593 - DNA, 61 bp, Homo Sapiens
gggaccaactgaacataacctgcttaaaagwtccacctaaattattggaatccttttatat

SEQ ID NO: 2594 - DNA, 61 bp, Homo Sapiens
gcagccaaaacaaacaaaaaccctgtaagcrctggccattcattaactatctgatcttaac

SEQ ID NO: 2595 - DNA, 61 bp, Homo Sapiens
gggctcgggcagctagattcatgctttctcwgtttaatgctattattgtaattgatatttt

SEQ ID NO: 2596 - DNA, 61 bp, Homo Sapiens
gagatattttttgcataagctgctaactggrtgtagaatctgaaacatgactaataataga

SEQ ID NO: 2597 - DNA, 61 bp, Homo Sapiens
tacagtcagaatgatgtttctcaaattctaygtctggcttaaagttctcagtgatttccta

SEQ ID NO: 2598 - DNA, 61 bp, Homo Sapiens
agtcttgcaaagagaaaattaatctttttgscagattagtaattttttaactgaaaataag

SEQ ID NO: 2599 - DNA, 61 bp, Homo Sapiens
ttaaataataaattttcatgaagaaatcatrtatgccgatatagacattatatgcctggat

SEQ ID NO: 2600 - DNA, 61 bp, Homo Sapiens
cttaattccaaacatcccatgagtatatcargatgaataaggaccaagggacctctgtgac

SEQ ID NO: 2601 - DNA, 61 bp, Homo Sapiens
agtcctgtgagatgaaagagatgtcttcacrtatcctcaatactcatggcacattccaaaa

SEQ ID NO: 2602 - DNA, 61 bp, Homo Sapiens
gagatcagcatttgcattttaggacaataamtagctgcatggtctctttgccttgatgaga

SEQ ID NO: 2603 - DNA, 61 bp, Homo Sapiens
tgcagatcacaataattcttagaaggaaatrctctcgcaaaactaagaccctgccaatcat

SEQ ID NO: 2604 - DNA, 61 bp, Homo Sapiens
caacagttccagaaacgacagaaaggaaggktatcaaagagaagaaccttaaaaaagcaat

SEQ ID NO: 2605 - DNA, 61 bp, Homo Sapiens
ttatttacgactcaatacgtgtattcttagscagtatcttgacaaacttcatgaaagttct

SEQ ID NO: 2606 - DNA, 61 bp, Homo Sapiens
atgaattcccttgattcttctttatctctarcctggcagtcattacttcctttcccgtgta

SEQ ID NO: 2607 - DNA, 61 bp, Homo Sapiens
accaaaccacagtcaatatcaatggcagaayagcaggcattaactggaactgacccaggca

SEQ ID NO: 2608 - DNA, 61 bp, Homo Sapiens
gcaggctttcccttcagttctgcatagattsacatcaggataaaactcaaacgttttgggc

SEQ ID NO: 2609 - DNA, 61 bp, Homo Sapiens
atggtaaaggctctggctttgactctgagayaagtcaacaaattgagaaaagactaaagca

SEQ ID NO: 2610 - DNA, 61 bp, Homo Sapiens
gacctagcgaaatcacctgagtgagatgccraaaaggtgctggagactcccgcatttaatg

SEQ ID NO: 2611 - DNA, 61 bp, Homo Sapiens
aggcaacctgcatgtatgaaagaactcagayacaatggccagtttcacaaaaggaaacaag

SEQ ID NO: 2612 - DNA, 61 bp, Homo Sapiens
aaaaactgtctttcccaactgcatactagartattatagatttggaatattttcttctttg

SEQ ID NO: 2613 - DNA, 61 bp, Homo Sapiens
cctacttatgagatttatggcctttatgatygaaacttgacatcatgtggtatttcctggt

SEQ ID NO: 2614 - DNA, 61 bp, Homo Sapiens
tcagcctttctcttacagctaaaagtgatcrtggcacgacacaggggcaatgagctctaac

SEQ ID NO: 2615 - DNA, 61 bp, Homo Sapiens
tctcttagctcaggcgtgaagaaattcagascacaggtagattaattaactccaggaagga

SEQ ID NO: 2616 - DNA, 61 bp, Homo Sapiens
aaaatagttccccagactacatttaaaatarcatttagagactacaacaagaaatacttgg

SEQ ID NO: 2617 - DNA, 61 bp, Homo Sapiens
ctgacagacccctgaactttgtggcaaagcrtcacaaggatctcgctatggtgtgatgcca

SEQ ID NO: 2618 - DNA, 61 bp, Homo Sapiens
caccccaaaacacacatattcactcatttawttcattgctgctggttccaaatggcaccca

SEQ ID NO: 2619 - DNA, 61 bp, Homo Sapiens
agaacacattcttttgactcctagaataccrtaataacagcatccagcactactgggcact

SEQ ID NO: 2620 - DNA, 61 bp, Homo Sapiens
tacagaggaaacaccagtggctttcttttgycctggctatattttagtcatttactttttt

SEQ ID NO: 2621 - DNA, 61 bp, Homo Sapiens
ctctgccctctaatctcctgctggtactttscattggttgaagccaactagaagccagagg

SEQ ID NO: 2622 - DNA, 61 bp, Homo Sapiens
gtcctttgcactcctgttgcaactgtaaaaygtgatcttggcattgtgctgccagtgcctg

SEQ ID NO: 2623 - DNA, 61 bp, Homo Sapiens
ggtcacgtaaacaaaattacagtaagcaaawccaccttgcatgatcccttccaggtactcg

SEQ ID NO: 2624 - DNA, 61 bp, Homo Sapiens
actccttaacaaaatagaaacaagtcaaatscaacagtacattaaaaaaagtggctgggta

SEQ ID NO: 2625 - DNA, 61 bp, Homo Sapiens
ccatgcctggctggttgcagccagttttggraaataaaatgtgctacagacattgtaaggg

SEQ ID NO: 2626 - DNA, 61 bp, Homo Sapiens
agatgccacaagcaagacttcaaccccctaygtggcaagtccctgcccgtctctcctctct

SEQ ID NO: 2627 - DNA, 61 bp, Homo Sapiens
ctagaagtggggtagctctaagcccctccasgacccttgctgtgctcctggcctcgtgggg

SEQ ID NO: 2628 - DNA, 61 bp, Homo Sapiens
ggtgtccgttgaagccagaaccagcatgtgwgtcttcaagaatctcaagagaaggctagaa

SEQ ID NO: 2629 - DNA, 61 bp, Homo Sapiens
gcttctctgtgtccccttcttggtgaaggcrccgttattagagttaacatataccccagct

SEQ ID NO: 2630 - DNA, 61 bp, Homo Sapiens
tgggcagggagaagaataaaggcggcttgcmacaggctttccaatagctctgctctctgct

SEQ ID NO: 2631 - DNA, 61 bp, Homo Sapiens
ccgagtgccttggtttctccttgatctaccscctaagcactcagcttttggcctggggaac

SEQ ID NO: 2632 - DNA, 61 bp, Homo Sapiens
atttgtgaatggctcttgcaaaccttaacaygcaaagctaatgacagattgtatcagaggc

SEQ ID NO: 2633 - DNA, 61 bp, Homo Sapiens
ctttccagatcatagtatatgtatataagtsacttactgggaagagcactacatcatagtt

SEQ ID NO: 2634 - DNA, 61 bp, Homo Sapiens
tcctcagtcctagaaatgccacgtgaacttygaacatggaaagttttttatttttgagaga

SEQ ID NO: 2635 - DNA, 61 bp, Homo Sapiens
aatttgggagaaaagagcttggtttgcatcsataagggctttgtaggagacaccctcatgg

SEQ ID NO: 2636 - DNA, 61 bp, Homo Sapiens
gcagaagatcaccttagagaaaatccgaacygactctcctatcttagaagtcatccaggct

SEQ ID NO: 2637 - DNA, 61 bp, Homo Sapiens
tggtgactctttaggttctcctgtggttatrtctctgggaaagactggaaatcacccccca

SEQ ID NO: 2638 - DNA, 61 bp, Homo Sapiens
cagttctgaactactgtaggattgcagtatraattcaaaactccaaaaaggagagaaacac

SEQ ID NO: 2639 - DNA, 61 bp, Homo Sapiens
ccctgtcatctaacagttcaaataagaaaaragattgtgtgttttcatgcagtttagcttg

SEQ ID NO: 2640 - DNA, 61 bp, Homo Sapiens
acaggacgactgctcatcccaaagaaagaarggttgatagtccttggtcaaaggtggagaa

SEQ ID NO: 2641 - DNA, 61 bp, Homo Sapiens
atcccaattttactaaaatatgaagcaaagsctcctggttttttctttttctttgtatatc

SEQ ID NO: 2642 - DNA, 61 bp, Homo Sapiens
aggccatgttccagcctctccatgccaccayttggttccctttctgcccacctcctgtggg

SEQ ID NO: 2643 - DNA, 61 bp, Homo Sapiens
ccaagaagggatggagtgctgctctcagttkcaaaagggatccagaagccaagaacgaagg

SEQ ID NO: 2644 - DNA, 61 bp, Homo Sapiens
agaccttcgtattttggaacatctttatctrttcatctcagactattccctctgccccaac

SEQ ID NO: 2645 - DNA, 61 bp, Homo Sapiens
gtgacctgccagaacatgtgctaagtatttyccgtgcatttcctcagttaattctaacaac

SEQ ID NO: 2646 - DNA, 61 bp, Homo Sapiens
gtctcttccagagctgtgggtgcttgcaaartcaagaaaacaaaagcttggatagcaagag

SEQ ID NO: 2647 - DNA, 61 bp, Homo Sapiens
aaggttcttgcttattcccatttctgacccyacctatttatccaactttctacacctgaat

SEQ ID NO: 2648 - DNA, 61 bp, Homo Sapiens
aaaaccagagaactaagccccactccaggckgaagaagtgcagccccagcttactatcaga

SEQ ID NO: 2649 - DNA, 61 bp, Homo Sapiens
acatccacgtcccacatcccctgtcattcayacagtcagctgacaaactttcattttatgc

SEQ ID NO: 2650 - DNA, 61 bp, Homo Sapiens
ttaggaagaacagcttagcatgagctatacyatcctgctatttaaagctaaaatgaggact

SEQ ID NO: 2651 - DNA, 61 bp, Homo Sapiens
caatagttgctcatttgttttagccactgaraattgactgagttctccacttggaacatgt

SEQ ID NO: 2652 - DNA, 61 bp, Homo Sapiens
atgaagtcaaagcccctcctcctcttgtccrtagatagagtagaccaactcacagaacttc

SEQ ID NO: 2653 - DNA, 61 bp, Homo Sapiens
ggcaggtcatgagtgattcctgaatgataaragattccataggatttcagagaagagtcac

SEQ ID NO: 2654 - DNA, 61 bp, Homo Sapiens
ttaccatatgaactgtatgttttcgtagatwctctttatcacattgagaaagttttctctc

SEQ ID NO: 2655 - DNA, 61 bp, Homo Sapiens
tgtctgttttctggcaatggccatcctagtrgacataaagtgatagctcaatgtggttttg

SEQ ID NO: 2656 - DNA, 61 bp, Homo Sapiens
tgtcttcagcatgagctcttgtagatgctgyttccagattcatggattgcttagggtcacc

SEQ ID NO: 2657 - DNA, 61 bp, Homo Sapiens
cttctaagcaagttactcatcatccatctgrttttaaacttccaaaacattgttgtgtcct

SEQ ID NO: 2658 - DNA, 61 bp, Homo Sapiens
cttttcttttagacaatctcagcaaacatawgtgtgtatattcattggcttttaaacagat

SEQ ID NO: 2659 - DNA, 61 bp, Homo Sapiens
tcatctactgtgttttattttctgctcctgrtaatttccttggtgttctttgtgtaatgta

SEQ ID NO: 2660 - DNA, 61 bp, Homo Sapiens
ttttttaagtttgatagttaaataagtagcmgcatggtatggagggaggagcagaaactgt

SEQ ID NO: 2661 - DNA, 61 bp, Homo Sapiens
ttttgcagaactcaccttcatccgtgtaccktttttgaaaactcaaagattactaaaagag

SEQ ID NO: 2662 - DNA, 61 bp, Homo Sapiens
tctgagtctgcacatgcaagaaaacagactycgctgaacaaatctagcctagctagtaaca

SEQ ID NO: 2663 - DNA, 61 bp, Homo Sapiens
atttggactctagggtaggatagcagttcaygtttgttagtaagaagaggaggaaaaagag

SEQ ID NO: 2664 - DNA, 61 bp, Homo Sapiens
ttagctctcagtaatgacccctccttcattyctgatgttgataacttgtattttctgtctc

SEQ ID NO: 2665 - DNA, 61 bp, Homo Sapiens
tgtgtgagtgttttgaaggatgaaatgcaargaacttcaaaaacatttataagatattaaa

SEQ ID NO: 2666 - DNA, 61 bp, Homo Sapiens
atcattgcaggcattctcctgtagtccttcyataactacaccagcatccctcttgccctcc

SEQ ID NO: 2667 - DNA, 61 bp, Homo Sapiens
ccagtgccaaacctgtcaccatctgaaacgycttcatctcaaggtaaacaagtgtgtgcac

SEQ ID NO: 2668 - DNA, 61 bp, Homo Sapiens
tccactggctcccctgactctcaggatcagrgagaaaaattgcagcaagatatgtgagtta

SEQ ID NO: 2669 - DNA, 61 bp, Homo Sapiens
ctgaagaagaggcaatccatgaagttggtgwtcggacaaggtgtaatcagtgataactcac

SEQ ID NO: 2670 - DNA, 61 bp, Homo Sapiens
ggtaccaccaattagttgtagacatcagtamcccactgtaactaatgggtagagcaattaa

SEQ ID NO: 2671 - DNA, 61 bp, Homo Sapiens
tcaaatgagccatagaaactaaggtccatgycagcagagatgcctgggatgctggtgcttc

SEQ ID NO: 2672 - DNA, 61 bp, Homo Sapiens
cacctataaaatattttgattaagggtgtaytatttgtcggaaaaagataagtaaaggcat

SEQ ID NO: 2673 - DNA, 61 bp, Homo Sapiens
ttataaaggttgtgactaggagtattcaagsctgatttctttccttgactggctttcattg

SEQ ID NO: 2674 - DNA, 61 bp, Homo Sapiens
tctttcctctgctgtatagcctttgcactartgtgacatattttcttactaaagatattat

SEQ ID NO: 2675 - DNA, 61 bp, Homo Sapiens
aaagaaaagaaaaagaaaaatgcagtacaarataagtgttagaacatatggagaagatagt

SEQ ID NO: 2676 - DNA, 61 bp, Homo Sapiens
cggacaggacttcttctgagctttttcaatwcagagctagattctcaggccctctccccaa

SEQ ID NO: 2677 - DNA, 61 bp, Homo Sapiens
tttggtgcctggaatgcattccccaggtttygctgaggttcccatctcaggcctccaccca

SEQ ID NO: 2678 - DNA, 61 bp, Homo Sapiens
gccagcaggtatatggtaaaatgaccaactratcaccagtgaaatgcaaatcagggccggg

SEQ ID NO: 2679 - DNA, 61 bp, Homo Sapiens
atcagcacaatagggtgactaagtattaccrcagtacaagaatttggacaaagttgatttg

SEQ ID NO: 2680 - DNA, 61 bp, Homo Sapiens
gctgactgtcctatatgcccttatttcctcrgtcagaggcatcactttctcagatggcttc

SEQ ID NO: 2681 - DNA, 61 bp, Homo Sapiens
tttatctccactttagagatggggtgtaacmaacaaaatgcagtaacaacaaatgtcacct

SEQ ID NO: 2682 - DNA, 61 bp, Homo Sapiens
gaaatgaaggcaagtttggcaagaggttgcrtggaactgaatcccatcttgcagagccatt

SEQ ID NO: 2683 - DNA, 61 bp, Homo Sapiens
aacatttttatttcattttaaagtgaaattsaatgtacctgtcctacaacttttctatctg

SEQ ID NO: 2684 - DNA, 61 bp, Homo Sapiens
atgcatcttgttctcattcttgtttgtccaygaattggctgtataaccatttaactttcca

SEQ ID NO: 2685 - DNA, 61 bp, Homo Sapiens
cactcctctgacttttcatgttttagacaawttttttctgaatccatctacgaaggaaaaa

SEQ ID NO: 2686 - DNA, 61 bp, Homo Sapiens
taaatactactattatatttaggactgtcawatgttaactctaccacctaaattaccaatc

SEQ ID NO: 2687 - DNA, 61 bp, Homo Sapiens
atgtgtgaaatgcatctgtacatgcaccatmgtttgttcatccattcaacactttaggatt

SEQ ID NO: 2688 - DNA, 61 bp, Homo Sapiens
ttaggcatgcagcctaccacacaactttgamaaagaaacaccgcacaaggttgaggattat

SEQ ID NO: 2689 - DNA, 61 bp, Homo Sapiens
ggatttctcatttccaactaatacctttttyattactggcacatttagctccccatgacta

SEQ ID NO: 2690 - DNA, 61 bp, Homo Sapiens
ttactgtcaatcaaagcctgtcagagggagytcaagatggccaatgggcccatttctcaat

SEQ ID NO: 2691 - DNA, 61 bp, Homo Sapiens
gctgactatacatttgtagtcaaaccgcatmtctttccaccctgaagtcacagcattcttc

SEQ ID NO: 2692 - DNA, 61 bp, Homo Sapiens
ttagttacttcattactttccccctgacctyatcctgaaaatactgtaacatggcaagcta

SEQ ID NO: 2693 - DNA, 61 bp, Homo Sapiens
acacatagtctgcctttcactgttggttatmgttttctagcctcctcttttattccctctc

SEQ ID NO: 2694 - DNA, 61 bp, Homo Sapiens
aggatgcttggaccaggagaatcatcctctraagaacatgaattacatttgggagactgag

SEQ ID NO: 2695 - DNA, 61 bp, Homo Sapiens
accgttctccatagtggttgtaatgatttaygtttccaccaacagtgtacagggtttccct

SEQ ID NO: 2696 - DNA, 61 bp, Homo Sapiens
ggtgccatattcagtggtgtgcaggtaaaamtttaacataggttctcgaaacatgcatata

SEQ ID NO: 2697 - DNA, 61 bp, Homo Sapiens
ctagaggtctattaaattgtctcagtgaacrtacatattttattaatctctgcgtgagcac

SEQ ID NO: 2698 - DNA, 61 bp, Homo Sapiens
tagtaaaaggattatagattcatggcaagayaaccagtcaccaaattaagcaatttgtcaa

SEQ ID NO: 2699 - DNA, 61 bp, Homo Sapiens
agaagaaattcagcaaaatgtatcagaagcstttaacatctcctgttaaagaaagagcaga

SEQ ID NO: 2700 - DNA, 61 bp, Homo Sapiens
tctcccaaagagtgccctttctcctgttgcrtagaaagatgaaagcctatagaaagtaaat

SEQ ID NO: 2701 - DNA, 61 bp, Homo Sapiens
ggccaacattttagatcctaatgacagaacygtgagaatataatctttcgaataattccag

SEQ ID NO: 2702 - DNA, 61 bp, Homo Sapiens
tactgatattgtaaacaacaaaaaatcatgycactggtatacagtttgctacaaaacttag

SEQ ID NO: 2703 - DNA, 61 bp, Homo Sapiens
aatttattgcaaatcaaagttaatgcttttwcttatggccttctatttagacagagtatat

SEQ ID NO: 2704 - DNA, 61 bp, Homo Sapiens
aagacttctaatttctatctacaggaagggrtctagaagccagctccaagtagaagaaaga

SEQ ID NO: 2705 - DNA, 61 bp, Homo Sapiens
gcagccacttggggctttgtcttttgttacytttcacttgaaattgaaatcactgtagcaa

SEQ ID NO: 2706 - DNA, 61 bp, Homo Sapiens
tacacatacgtctctgtcacaggctgcatcrttgacttccagtacctggaggtcatccaca

SEQ ID NO: 2707 - DNA, 61 bp, Homo Sapiens
ttgtcagcaacaccaaggtgaaaatcagcgyggaatccatagaaaggttgtggatggtatt

SEQ ID NO: 2708 - DNA, 61 bp, Homo Sapiens
gcattggcagatttaactttgaatggttgartacagggatcaatccgtttagagagcaaca

SEQ ID NO: 2709 - DNA, 61 bp, Homo Sapiens
catatcttagatgttcttagagctgaaactwcaatgttggagattagattttcttagacct

SEQ ID NO: 2710 - DNA, 61 bp, Homo Sapiens
tccgtagcaaggctataggaacattgcatcraaaagtacagcttctggggggtctctgttg

SEQ ID NO: 2711 - DNA, 61 bp, Homo Sapiens
ttttcaccaaagtaatagacaaactttatcmagctgagtgatcttatttataactcccatg

SEQ ID NO: 2712 - DNA, 61 bp, Homo Sapiens
cgtggcaacagaaagcctcaaaaatgtaaartccctcaacttctattgggcagactcttcc

SEQ ID NO: 2713 - DNA, 61 bp, Homo Sapiens
cactcaaggggctgttgaaaagattaatgasattgtgtatacaaaattccagccaccatag

SEQ ID NO: 2714 - DNA, 61 bp, Homo Sapiens
cactttagttcaataaggatactggccattrttcaagaactggtcttagtcacacacacaa

SEQ ID NO: 2715 - DNA, 61 bp, Homo Sapiens
cttttggtgggagagtaaattaggtcaaccrtcgtgaaaatcggcgtggcaattcctcaaa

SEQ ID NO: 2716 - DNA, 61 bp, Homo Sapiens
attaatattatgacctgaagttatatgatasagctttagcaccataggtcaacaaatgact

SEQ ID NO: 2717 - DNA, 61 bp, Homo Sapiens
agaattttttccaatcttattttctcctgartaaaaggttcctccaaatgagcccaacaat

SEQ ID NO: 2718 - DNA, 61 bp, Homo Sapiens
actttaacaatggtgtattcttctatttcayaatttcactggatagccatatagaattttg

SEQ ID NO: 2719 - DNA, 61 bp, Homo Sapiens
gaaggagatagaacatgtgcagaaggttgayctgtagataaagaggctgagatatgtgccc

SEQ ID NO: 2720 - DNA, 61 bp, Homo Sapiens
ctgatatgatggacttgctcagatgatcttkttttctttcagctcagtgttctgtaatttg

SEQ ID NO: 2721 - DNA, 61 bp, Homo Sapiens
tgttgggtttcaatatcttaccacaactgcyatcgagggaggtataagtctcaccataact

SEQ ID NO: 2722 - DNA, 61 bp, Homo Sapiens
taactcacattgagaacttgtgatctgaaarcactaaggaatttctgccattgcaggtagg

SEQ ID NO: 2723 - DNA, 61 bp, Homo Sapiens
cacattcctcaggccagaacataatcatagyatcccaccagacagcaaggaaagcagaaaa

SEQ ID NO: 2724 - DNA, 61 bp, Homo Sapiens
agcccctagtcacccttctgaacaccataargtaagttgcgatctccatcagacactgggg

SEQ ID NO: 2725 - DNA, 61 bp, Homo Sapiens
gttggggttatcactggggagtgaggccgcrtttagagtttggtctaagacaatgtctgaa

SEQ ID NO: 2726 - DNA, 61 bp, Homo Sapiens
tggggaattgaataatagaaattttgaagawggataggatcttggtgatcaattaatgtac

SEQ ID NO: 2727 - DNA, 61 bp, Homo Sapiens
cttacttctcctttctctataaaacatgacygtgctttgaagtaaaattgaagtaaaaggt

SEQ ID NO: 2728 - DNA, 61 bp, Homo Sapiens
accattttccatgtatacttctttaagctamttccacttttttgttgtgtgaaagaatgaa

SEQ ID NO: 2729 - DNA, 61 bp, Homo Sapiens
cctttgatggttattaaaaacagatgttcartgttcttggtaaatcttaaaaattatgcct

SEQ ID NO: 2730 - DNA, 61 bp, Homo Sapiens
ggccttgaaccagatgtttgacaacagcaargaaaatgagatggaaacttgggaagccagc

SEQ ID NO: 2731 - DNA, 61 bp, Homo Sapiens
tgtatctcttctctgtggctgctaaaagctragaaagcctccatctgttactaattcttgt

SEQ ID NO: 2732 - DNA, 61 bp, Homo Sapiens
tcatgtgccagcactgttctagttgctgggratacagcattgagaaaataaagtccctact

SEQ ID NO: 2733 - DNA, 61 bp, Homo Sapiens
atcaaaaataacagttttagatagtacatckcatacaactttattataattccaacacagt

SEQ ID NO: 2734 - DNA, 61 bp, Homo Sapiens
atattcatcaagtcagaggcttcttagactygctgcccttgactcactatgttgctctcat

SEQ ID NO: 2735 - DNA, 61 bp, Homo Sapiens
ccgtcaaagagacgtgaactttctcagttaygtaatttcaactaccccatgttcttatctt

SEQ ID NO: 2736 - DNA, 61 bp, Homo Sapiens
tgcccttaaattaaaaacaccacctcaaacrgcaattaaatgcgcatacacatgtgtaatg

SEQ ID NO: 2737 - DNA, 61 bp, Homo Sapiens
tgtcaccagctatcatgctgctcctgttaaytgattcattaatccagtacacccacatctg

SEQ ID NO: 2738 - DNA, 61 bp, Homo Sapiens
aacgcatgctagaacacaaaaccaaaagttsctgtaatattctttgcggtgatcctgtggg

SEQ ID NO: 2739 - DNA, 61 bp, Homo Sapiens
gaaagcaaaggaagaaaggtagcatgtggcrttaacagacatgggggaaggtaagagaaac

SEQ ID NO: 2740 - DNA, 61 bp, Homo Sapiens
gactttgcacccatatagtatttatttttgrctgtgcatatatctaggtttaagttaactc

SEQ ID NO: 2741 - DNA, 61 bp, Homo Sapiens
caccctcccagcggttgcagctaaaagcctyggagacctccttgttttttccagtcaagcc

SEQ ID NO: 2742 - DNA, 61 bp, Homo Sapiens
cgtaaactccataacctttagaaccttcacrtcagagattcctcatgatcatgaattcctt

SEQ ID NO: 2743 - DNA, 61 bp, Homo Sapiens
ggatgttagttgcattatcgatcttagcttwatagaacaggatgaataaaacaggacccat

SEQ ID NO: 2744 - DNA, 61 bp, Homo Sapiens
caggaccatgaaggatttcaagtaggtacaygacaatcacatgggtattttacaaagatca

SEQ ID NO: 2745 - DNA, 61 bp, Homo Sapiens
atgctagaggatggtgttatgaatagataaytttgtcattaaatgacgtccactgctatga

SEQ ID NO: 2746 - DNA, 61 bp, Homo Sapiens
atttggctgaagatttgttatccctggaacrtttttcttgagatggcccctctctgttgca

SEQ ID NO: 2747 - DNA, 61 bp, Homo Sapiens
gggagggaattccttgatgaagttaatggaygggagatggttcctgcatgtaaaatcagga

SEQ ID NO: 2748 - DNA, 61 bp, Homo Sapiens
cctgtgagagcgcacacagtctgaggtttgycaagagatggttattatagtggacactgaa

SEQ ID NO: 2749 - DNA, 61 bp, Homo Sapiens
ggaattgtcttaatgtttcttaaagtcatartatactacagctagaaaatatctttcagaa

SEQ ID NO: 2750 - DNA, 61 bp, Homo Sapiens
acattgaggttctatttatgaccactctcarttggacaaaaggacaagctagggttgcctt

SEQ ID NO: 2751 - DNA, 61 bp, Homo Sapiens
aacagtggtaaacatttctttgctattatcrtcatcttttgactggccagtgtattgaaga

SEQ ID NO: 2752 - DNA, 61 bp, Homo Sapiens
caggttcactgcagcactattcacaatagcraagacgtggtagcttttgaaaccatcatta

SEQ ID NO: 2753 - DNA, 61 bp, Homo Sapiens
agaaaacaggttttgattttagttgaaacayaagcagacctactgctaaaaataattttaa

SEQ ID NO: 2754 - DNA, 61 bp, Homo Sapiens
tttgttaacagagcactggggctatgcattmcactctttaccttaaagacctttgcataat

SEQ ID NO: 2755 - DNA, 61 bp, Homo Sapiens
ggtcactgatgacctttctgagagtaatttyagtggtgaggaatgctcagaagtcttgtta

SEQ ID NO: 2756 - DNA, 61 bp, Homo Sapiens
ttagcacttattacattgtaatatcagtatytgcttacatatctatctttttcatgagact

SEQ ID NO: 2757 - DNA, 61 bp, Homo Sapiens
cattcaattcagattatatgactagtgcaaygtaatcataggactttcctagtatttcatg

SEQ ID NO: 2758 - DNA, 61 bp, Homo Sapiens
ttggggaaactattcatctgtcatatactaktgatcctttggcacttaaataaatgtgaaa

SEQ ID NO: 2759 - DNA, 61 bp, Homo Sapiens
atgacattttcacattggttgctggttatayatgtgcctccaaaatcagtaatctccaatt

SEQ ID NO: 2760 - DNA, 61 bp, Homo Sapiens
atatcacgttgctataaagtgagaggatatyctgaatttgtatctgaaacagagtataggc

SEQ ID NO: 2761 - DNA, 61 bp, Homo Sapiens
ataagagttgttggcttttagaacatgtcaragaacctacaagggtgagccaaccaacaat

SEQ ID NO: 2762 - DNA, 61 bp, Homo Sapiens
tgtgatgtcatttttgatagcaaatgtattstatcttctgtgtaaaagaggatgggaaaat

SEQ ID NO: 2763 - DNA, 61 bp, Homo Sapiens
tacttccttattattctggcactagtcaagwtagaccttcaaacaatgtgaactaatttgt

SEQ ID NO: 2764 - DNA, 61 bp, Homo Sapiens
ttagcatgtgtctaataagaatcaatctttkcagttaaacaggcaaatgggctaatgttct

SEQ ID NO: 2765 - DNA, 61 bp, Homo Sapiens
tggaaacaaaacgtgtatcatccttttctcyttctggatcgactatagctgaaactgtgct

SEQ ID NO: 2766 - DNA, 61 bp, Homo Sapiens
tttaatcttagaatgtaaccaaatcttcctsaatactttgaaaatcagatttaatggtaaa

SEQ ID NO: 2767 - DNA, 61 bp, Homo Sapiens
ctctggaaactttaagacctaggagcttatsagaaatgcggaatctctggctgtgtcaaga

SEQ ID NO: 2768 - DNA, 61 bp, Homo Sapiens
aagttcaaaacttcatcaatcttagaacctwaccaaactgaattggtttatcgtaactcac

SEQ ID NO: 2769 - DNA, 61 bp, Homo Sapiens
ggaaggaagaaaaagagaagaaaataacaarctactctggctccataaacatgacttgcga

SEQ ID NO: 2770 - DNA, 61 bp, Homo Sapiens
agccatctttaacgtgaagctatcaatatcrtcctgggcttatggattcatttcacttcta

SEQ ID NO: 2771 - DNA, 61 bp, Homo Sapiens
taggaagtgaatatcattattctgtctacawtgggatacttctccattttataggtgaaga

SEQ ID NO: 2772 - DNA, 61 bp, Homo Sapiens
tgcacccaggcagtctggcttcagagtctgratattaaaacggtacataaggttcagcctt

SEQ ID NO: 2773 - DNA, 61 bp, Homo Sapiens
ataccacttaccctttacctagattgactcrttgttaatattttgccagatttgctttgtc

SEQ ID NO: 2774 - DNA, 61 bp, Homo Sapiens
ttaacctaaagtttagtgtttgatgaagctrttgttatctttagagcaccatcgtatattc

SEQ ID NO: 2775 - DNA, 61 bp, Homo Sapiens
aataccagttggactgagagccttttcaatygtaggtaagagacagtcacagagactccca

SEQ ID NO: 2776 - DNA, 61 bp, Homo Sapiens
actaataacaactgtaatttcaaagtatgaygaatgaatgtcatcagcattttggaacatc

SEQ ID NO: 2777 - DNA, 61 bp, Homo Sapiens
aggctgggtgtattactgacagtgagatttsagtcgtgtctcacagtcttattgccgagca

SEQ ID NO: 2778 - DNA, 61 bp, Homo Sapiens
ggctgggatgctctcagaataatcattgtgygcattcccaagggtgtctgggaccatacat

SEQ ID NO: 2779 - DNA, 61 bp, Homo Sapiens
caatactctgcagactcgaaaaaacatyacrtacattcttggaacttcccagtggtttaat

SEQ ID NO: 2780 - DNA, 61 bp, Homo Sapiens
aagagcagggatttccatgacctggggtctrtggatcagcttctaaatacccaaacctctg

SEQ ID NO: 2781 - DNA, 61 bp, Homo Sapiens
gagcagggtgggtgtgccctcctaagctctsgaatagcaaatgccaaactcacatgtctgt

SEQ ID NO: 2782 - DNA, 61 bp, Homo Sapiens
aaactttttccaagtttctttatcaagttgytagagactcaaagctcccaaggcaagtgtt

SEQ ID NO: 2783 - DNA, 61 bp, Homo Sapiens
gtgacatgtccttgccagctctgtgaatgartaaatgttcacttggctttcttttcattcc

SEQ ID NO: 2784 - DNA, 61 bp, Homo Sapiens
attttaggctttgcaggtcataccatctccstctcaagcactcaactctgccactgtagca

SEQ ID NO: 2785 - DNA, 61 bp, Homo Sapiens
gagagacacagtgagataattattcctcacrcctgttagaagaacattccaccgtctcaga

SEQ ID NO: 2786 - DNA, 61 bp, Homo Sapiens
ttccattgctactgcaacaagctaccacaaytttagtggcttgaacaatataaatgtatta

SEQ ID NO: 2787 - DNA, 61 bp, Homo Sapiens
aactggcttgaaggtaacatggtaaatgcartttggatgtattgagtataaagtgactcaa

SEQ ID NO: 2788 - DNA, 61 bp, Homo Sapiens
ctagatgcttcgcacactatctcatcaatcrtacagtcctgccaggtaaggcttctcagct

SEQ ID NO: 2789 - DNA, 61 bp, Homo Sapiens
agatagtccaggtgacaactcaggaaagaaytgccacttcgaagccggaacacaaaaccct

SEQ ID NO: 2790 - DNA, 61 bp, Homo Sapiens
taaagtcaagtcatatcacttcacctctctkccagtggacatccctttgcaaattaatacc

SEQ ID NO: 2791 - DNA, 61 bp, Homo Sapiens
ggtcttagaaaccatggatttaagagcaacrtgaattaaatgtccaggaaggtgcgaaatc

SEQ ID NO: 2792 - DNA, 61 bp, Homo Sapiens
actaaaattatagttcttcaatggctcttaytattgtaacatttttctcagttccacactg

SEQ ID NO: 2793 - DNA, 61 bp, Homo Sapiens
cagaaatataggtggtctggaaagcaacctygggagtttgtagttatgtcactactggcag

SEQ ID NO: 2794 - DNA, 61 bp, Homo Sapiens
cctccttgttacctgtaacaaatctaagttraggttattggcattaatccctccctgcccc

SEQ ID NO: 2795 - DNA, 61 bp, Homo Sapiens
aactgtttgtgcaaatcgcctgtaagcttaytgacctgaatctttgactccttgttttctc

SEQ ID NO: 2796 - DNA, 61 bp, Homo Sapiens
ggagagtagagtatggtttaaactacagaaygaagtgtacagattttagattctggcatgt

SEQ ID NO: 2797 - DNA, 61 bp, Homo Sapiens
ttcaccacagataggctcttcagttgattcygtcctagtggaatagtgaatagtgtggcaa

SEQ ID NO: 2798 - DNA, 61 bp, Homo Sapiens
aatcatctctggttcaaaaagctatcaacartttattcctcccaacccccaattgcttatt

SEQ ID NO: 2799 - DNA, 61 bp, Homo Sapiens
ggccttagtcactgattgcgaattttactarccagcattcttctagggatgcaaatgaaca

SEQ ID NO: 2800 - DNA, 61 bp, Homo Sapiens
ggtgcagggtcctgatctcttcactcctctrtggataatatggaagctggtgggggtgttg

SEQ ID NO: 2801 - DNA, 61 bp, Homo Sapiens
ataatgaatgcagtctcgccattcaaatgcraccataagtacacagaagataagaatttaa

SEQ ID NO: 2802 - DNA, 61 bp, Homo Sapiens
gttttacaataggaaaagaaaatggtatgcyaagtggcctcttgtttctgaaatttttggc

SEQ ID NO: 2803 - DNA, 61 bp, Homo Sapiens
ggtacttgaatttcaaatggggtttgttaartagctttgctaggaaagtcgagaaggaaga

SEQ ID NO: 2804 - DNA, 61 bp, Homo Sapiens
ggatcagtaaaatatttctgacttccaaaakatgcatcataacagcttaggtggtttttat

SEQ ID NO: 2805 - DNA, 61 bp, Homo Sapiens
tctgacttccaaaagatgcatcataacagcktaggtggtttttatgacattaaactacttt

SEQ ID NO: 2806 - DNA, 61 bp, Homo Sapiens
ggcttgccttatactttgcctcttaaatacrtcatcaaatgaaaactatgtttaggaatgg

SEQ ID NO: 2807 - DNA, 61 bp, Homo Sapiens
ctccaaacagtactacaggaggagggagcarcatggagcaatcagaagatgggctttagaa

SEQ ID NO: 2808 - DNA, 61 bp, Homo Sapiens
tttgacacatgcaatgacataggatggcagraacacttaccttggtttagtggatcagaga

SEQ ID NO: 2809 - DNA, 61 bp, Homo Sapiens
gacacgctgcagggaaggtcccacattctgracctactggaggttatagtcttacttctgt

SEQ ID NO: 2810 - DNA, 61 bp, Homo Sapiens
tagcatcacctccactcctcccaacctactygcaggaataattaacgattcaaagcccaga

SEQ ID NO: 2811 - DNA, 61 bp, Homo Sapiens
ttcatttcagatctttgtttctttcatgacscatacaacaatttgcaatttttgtaattat

SEQ ID NO: 2812 - DNA, 61 bp, Homo Sapiens
agaaagtcaaacttcattgttgagtatcagmtttgataggcatttgggcattcttccactt

SEQ ID NO: 2813 - DNA, 61 bp, Homo Sapiens
gtatcaggcaggagagttgcaaagcctctgyggatcaagtcttcagcttcagcaaaagccc

SEQ ID NO: 2814 - DNA, 61 bp, Homo Sapiens
gatgctgataagtcaaaagtgaaatctagaraactaacattacagtgcaaattgggagctt

SEQ ID NO: 2815 - DNA, 61 bp, Homo Sapiens
ccaaatagcttgttggcaagtacaagtatartctagcatttttataactgggtactaaaaa

SEQ ID NO: 2816 - DNA, 61 bp, Homo Sapiens
cgagccaagggacaaagctggccagggtaaygctgtggtgcacgggaccaaacccattatt

SEQ ID NO: 2817 - DNA, 61 bp, Homo Sapiens
agttagcaggcttacaacttctctatcctaytaccaacgcttgtccaaggattttatggaa

SEQ ID NO: 2818 - DNA, 61 bp, Homo Sapiens
aacaccgcacatattagactgtagggtctakacttatcctcaagaataaaaccaatatcaa

SEQ ID NO: 2819 - DNA, 61 bp, Homo Sapiens
ggcccccaaacacatgctgctgggcatcagsgtgtctacaataaaaactcatagagggaat

SEQ ID NO: 2820 - DNA, 61 bp, Homo Sapiens
gcttcagggatgtggcttaaaagtatactgrtgccattccagacatcatgttcgatatcat

SEQ ID NO: 2821 - DNA, 61 bp, Homo Sapiens
tgcccattttacaaagtgttgtgaagatcaratcaaataatcaaaagtctaagtgttttat

SEQ ID NO: 2822 - DNA, 61 bp, Homo Sapiens
tactctctcctggggtagtttcaagtcccaytggctttaaatattgtcaataaatcaaatg

SEQ ID NO: 2823 - DNA, 61 bp, Homo Sapiens
tgtgaaatgtcatttttttgtcttcattcckttctgatgggacacacccttccatcaggcc

SEQ ID NO: 2824 - DNA, 61 bp, Homo Sapiens
ccttaggaatacatgttattatcagtaaacwctgacatcagaggtaatcaatccagatgac

SEQ ID NO: 2825 - DNA, 61 bp, Homo Sapiens
aggtaccctctttaccaattgacagagatgraaacctggactccctacttggccttctatg

SEQ ID NO: 2826 - DNA, 61 bp, Homo Sapiens
cagtcattatgtatcttctctgatggccccrgtatctaaagggatgtaggtaatggtgttg

SEQ ID NO: 2827 - DNA, 61 bp, Homo Sapiens
acctgtcacaggccatttaccctggaggtamtggccacctgagcgtgtgtgtgtgtgtttg

SEQ ID NO: 2828 - DNA, 61 bp, Homo Sapiens
atcccactcactaactttaccacctctattrgcaacattgtatggctaattcccattcacc

SEQ ID NO: 2829 - DNA, 61 bp, Homo Sapiens
aatgcaagcgggggatctggcaggagtagakgaatgaccaagggatgtatctgccttaatt

SEQ ID NO: 2830 - DNA, 61 bp, Homo Sapiens
catctttccccctttccaggtcacccaaagstcagctcttaaagatacactgttcctcaac

SEQ ID NO: 2831 - DNA, 61 bp, Homo Sapiens
agataaatggggtaattcaaaacccaggatygggttgaatatttaattgcttttcttcttt

SEQ ID NO: 2832 - DNA, 61 bp, Homo Sapiens
atccaaaagtatcacattttctaaaaatacraacaaagctttaatataatagataattact

SEQ ID NO: 2833 - DNA, 61 bp, Homo Sapiens
tcattggtcagtgatgggacaaaggctcggyggtttttgagctcccctggtgattctaatg

SEQ ID NO: 2834 - DNA, 61 bp, Homo Sapiens
ttcaccttggttctctgacacccatggaaartttaggttagggagagagagtggaaagaga

SEQ ID NO: 2835 - DNA, 61 bp, Homo Sapiens
atctgtcaagcagaggtgagatgatattacrgcctccataatcctgtgaaatttccaccaa

SEQ ID NO: 2836 - DNA, 61 bp, Homo Sapiens
aggacattgctgtaattttgtccccctcatrtccagcgagttgtctgaggctctccgtgtt

SEQ ID NO: 2837 - DNA, 61 bp, Homo Sapiens
cattgttctccagggcaaagcccatgacctsgatgatagagtagactgcattttgatttat

SEQ ID NO: 2838 - DNA, 61 bp, Homo Sapiens
acaacactgtggagttccagggccttagtgmagtacaggatttggactaaatccttggtct

SEQ ID NO: 2839 - DNA, 61 bp, Homo Sapiens
ggagatgagagttctgttggcagataatgasaaaataaagaggtctgaaaatgactgtcag

SEQ ID NO: 2840 - DNA, 61 bp, Homo Sapiens
atttacttttcctttcctctcatattagacycattgactacctcaactcccctttccatga

SEQ ID NO: 2841 - DNA, 61 bp, Homo Sapiens
ctccctgacctgatgtgctttcatttcagakatttcagattcgctaacagccactgagtcc

SEQ ID NO: 2842 - DNA, 61 bp, Homo Sapiens
tttctgctatattgcattgcatcatgtagtstagttctcatttgttgcatgcctagctcct

SEQ ID NO: 2843 - DNA, 61 bp, Homo Sapiens
catttgctcctgctgtgtttctgtggggatrgtgcgtgtatgtttgtgttcctgggtgaaa

SEQ ID NO: 2844 - DNA, 61 bp, Homo Sapiens
agcaatcctgccatgctcactgatcctccartatgatgtgctaagcattggtgttccctgt

SEQ ID NO: 2845 - DNA, 61 bp, Homo Sapiens
cactgcacacctctctgataattgacttaayatttatgcatcaaggtagactgctccatta

SEQ ID NO: 2846 - DNA, 61 bp, Homo Sapiens
ccctctgatcaaaattcctgagcacagtacraggttgacaaatggggactgccaggcccag

SEQ ID NO: 2847 - DNA, 61 bp, Homo Sapiens
caagaagagaaaacaaaacctggccaagccrttgattgcatctggaccatgaaagccactc

SEQ ID NO: 2848 - DNA, 61 bp, Homo Sapiens
cgtttaaaattgagtgtgtatccaaggaagrcagacagaggccacagtccccaggatggct

SEQ ID NO: 2849 - DNA, 61 bp, Homo Sapiens
ggttcagctagctagcaggtagtggaactgrtatttgaaccaagttggtcaggttccagat

SEQ ID NO: 2850 - DNA, 61 bp, Homo Sapiens
gccaagttgggaccacgggccgggctagaaygatccatggaaaagttctgtgctcagggga

SEQ ID NO: 2851 - DNA, 61 bp, Homo Sapiens
actcacctaaggtcacagaaagaatggtacmgaggcagggttgagccacactgcctaattc

SEQ ID NO: 2852 - DNA, 61 bp, Homo Sapiens
ctcaaccagttcacaaagacttgtctcacckacctgggacaacgcacaaagagaatgggca

SEQ ID NO: 2853 - DNA, 61 bp, Homo Sapiens
tatgcgctagatggaaaatggattggctagwtcagctagtaatgtctgctacaaccgcagg

SEQ ID NO: 2854 - DNA, 61 bp, Homo Sapiens
cggcaggtgattaatattcatgcaaggaggwtttcaccagaatttcatggagttgacatct

SEQ ID NO: 2855 - DNA, 61 bp, Homo Sapiens
aacctgataagagttgttggaggattctgargtgaaacattgcttgtgaaggttttcacac

SEQ ID NO: 2856 - DNA, 61 bp, Homo Sapiens
gggaatatttacatgcggtattattttccarcttgtacacagcaccctctttattgctaag

SEQ ID NO: 2857 - DNA, 61 bp, Homo Sapiens
agaaactcagaactcattgttgacaccaacytctcctttaccctatgtagagactgctaag

SEQ ID NO: 2858 - DNA, 61 bp, Homo Sapiens
aggtggggaagtaggtgatgggtgtgctagyaggataccaagcaagaaggaacttaccccg

SEQ ID NO: 2859 - DNA, 61 bp, Homo Sapiens
actatgaaggtggtttgagaatatctccccmaacagtactcagcaaggcaatctctccact

SEQ ID NO: 2860 - DNA, 61 bp, Homo Sapiens
tgcccccaagtaattataaggagcacacctyttcactctcatattctcttgatttagacat

SEQ ID NO: 2861 - DNA, 61 bp, Homo Sapiens
ttccagtgtttttgctggaagtgtaaagttrttagcacaggcatatttctcagttagcaga

SEQ ID NO: 2862 - DNA, 61 bp, Homo Sapiens
accaaatgcaaattgaacatactgtattcaraatgctagccttgctgaggaggtaatttaa

SEQ ID NO: 2863 - DNA, 61 bp, Homo Sapiens
agtacaacacccaaggtcctccgtagtcagktctgagtttttacctcagaaactgcatttc

SEQ ID NO: 2864 - DNA, 61 bp, Homo Sapiens
ctcctttctctcttctctctgttttagctcrtcctagttcagtggacatgcaagggctact

SEQ ID NO: 2865 - DNA, 61 bp, Homo Sapiens
aattcagcctgaggtatatatacactaggayacctgtttattggatgtatttaagacaagg

SEQ ID NO: 2866 - DNA, 61 bp, Homo Sapiens
tatgcttccattttgagaattcgtagtgatyggtgttcaaagtaacttttcattgtggcaa

SEQ ID NO: 2867 - DNA, 61 bp, Homo Sapiens
tggagactgtgcaagaatccaaaatgaccaygtgggtacaataaacccttccaaagcagct

SEQ ID NO: 2868 - DNA, 61 bp, Homo Sapiens
ctgtgatacagtttccaagtaaaatagccaytctgtgacctgactgtacctctagctcgaa

SEQ ID NO: 2869 - DNA, 61 bp, Homo Sapiens
gtcagataataggatgccttaaaaccaggtmtagaaaatcagatttggttgatgggcaaag

SEQ ID NO: 2870 - DNA, 61 bp, Homo Sapiens
aggggaagaggaggctgataagtttgacgartgagtgagaaagtaaagggacataaatgag

SEQ ID NO: 2871 - DNA, 61 bp, Homo Sapiens
cagaagtgcaggacgactatctcccatcacrataaaacccccagaacctctcagagtccta

SEQ ID NO: 2872 - DNA, 61 bp, Homo Sapiens
actgtagtaacaaagcctagcacagaaattwtcccccctagaaatagttgcttagcttgtt

SEQ ID NO: 2873 - DNA, 61 bp, Homo Sapiens
aggttcttgtaatgaacattcacatggcccrcatcttaaccatgcactcattttttacagc

SEQ ID NO: 2874 - DNA, 61 bp, Homo Sapiens
taaatagaggctatgctttcctctttgtatrtcccaaaacgccttcctcagcacaatagct

SEQ ID NO: 2875 - DNA, 61 bp, Homo Sapiens
aacaaacggcatggctgtaacaatttttttmaagtatggcagggcatattgccatcatgaa

SEQ ID NO: 2876 - DNA, 61 bp, Homo Sapiens
gtagtatttctggagggcctattatgtgacragcagcatgcagaatggaacaccatgccta

SEQ ID NO: 2877 - DNA, 61 bp, Homo Sapiens
actggagctgtttgggagaagtagtttcttsaaatgttctctggtggtttcattgggagtt

SEQ ID NO: 2878 - DNA, 61 bp, Homo Sapiens
tttatataattatttattaacaaataagagrtaaaagagcagcaagaaacgagagtcaaac

SEQ ID NO: 2879 - DNA, 61 bp, Homo Sapiens
tccaagagtgctcatcacagagatttaactraaagcatcaacatctgcacaacacaccaca

SEQ ID NO: 2880 - DNA, 61 bp, Homo Sapiens
gaaggggttattacaccttttcagatgcaayatcaaagctgtcattgctatgtaatttaca

SEQ ID NO: 2881 - DNA, 61 bp, Homo Sapiens
tttttaaccacttgtatatatatatgaaaaytgtctagtccatgaaaggattctacaaata

SEQ ID NO: 2882 - DNA, 61 bp, Homo Sapiens
cagaataaagattacacttcccagccttctytgccgcaaaatgtagccagagaactaaatt

SEQ ID NO: 2883 - DNA, 61 bp, Homo Sapiens
gtttccttatctaaaattcagacaatcacarttccttgcaaagttccttgtaggatttaat

SEQ ID NO: 2884 - DNA, 61 bp, Homo Sapiens
agcgggagggctcgttctgatcaagttgcayatctgatcaagttacaacccacttaaatat

SEQ ID NO: 2885 - DNA, 61 bp, Homo Sapiens
gtttccagatctgtagtactcagtttacacrttcatgccctttcccaaattcttgggaaca

SEQ ID NO: 2886 - DNA, 61 bp, Homo Sapiens
cccagggtgagaaaggggagacaggaccacrcatagtttgcagggtccagtgcaaaatgaa

SEQ ID NO: 2887 - DNA, 61 bp, Homo Sapiens
ccaaacaaatcacctcaaaaatctagctgcytgagtcatggacaacacagactacttgtaa

SEQ ID NO: 2888 - DNA, 61 bp, Homo Sapiens
attcatgctattgattcttgggaagtccatyaggaacagctcagagcattcagtatgcttg

SEQ ID NO: 2889 - DNA, 61 bp, Homo Sapiens
aaaaagctcaagcaaagaatgtttaacactrtgttacgaagccctgtgcatacaatggtct

SEQ ID NO: 2890 - DNA, 61 bp, Homo Sapiens
ctcctggacaaggcagatgtggtagtctttrgatttagctatagtagttgtgactgaggtc

SEQ ID NO: 2891 - DNA, 61 bp, Homo Sapiens
gcaaataaatatttcaagcattcctatacartttaaccacatcaatcaactatagaataaa

SEQ ID NO: 2892 - DNA, 61 bp, Homo Sapiens
cctgtgtgtagaaggcataggtcattacacrctcctgatgttgcctgcaaaggctatattt

SEQ ID NO: 2893 - DNA, 61 bp, Homo Sapiens
tgatggactagttagaatttcaccccgggtrtataagcctgaacccattggtccatttcta

SEQ ID NO: 2894 - DNA, 61 bp, Homo Sapiens
tgcagaattactctggatccactttgatcaycaagctggccagcccagcctaatgtagtct

SEQ ID NO: 2895 - DNA, 61 bp, Homo Sapiens
gcaagaacagtgctgtcctcttgtttaatcrtgggagaggtgagaggagaaggaaggcatt

SEQ ID NO: 2896 - DNA, 61 bp, Homo Sapiens
tgataaagcaaactgtatttcattattgtargtgtcggaagatgctaacaccttggataac

SEQ ID NO: 2897 - DNA, 61 bp, Homo Sapiens
gaacctatggtggaaagttaagtagcttagrtggcccaactaggaagtaataagagccatg

SEQ ID NO: 2898 - DNA, 61 bp, Homo Sapiens
acaacctaaaataaacacagtctggtcaggygcttaaaacaaaagctatttacaagcaaca

SEQ ID NO: 2899 - DNA, 61 bp, Homo Sapiens
acacatttataacatgcaaattgacttaacrttaaatggcgtcttcccagaccaagtattt

SEQ ID NO: 2900 - DNA, 61 bp, Homo Sapiens
ttcctctctccaacatagtgccagactctcrtattaggaaatgatgaaaccatcaaccaaa

SEQ ID NO: 2901 - DNA, 61 bp, Homo Sapiens
acagcttctgcctaaatcattggacacttgscctctacataagaagtcccactatcttgac

SEQ ID NO: 2902 - DNA, 61 bp, Homo Sapiens
gggagtaaaggggttgaggtggtggggtgaraagtgtccactcttggtccctgcaagtctg

SEQ ID NO: 2903 - DNA, 61 bp, Homo Sapiens
gttgtcatgacaattaaatgacatcatgtgygtgcaaccaaaatagcatttggctcatcct

SEQ ID NO: 2904 - DNA, 61 bp, Homo Sapiens
tcatcagaactgccgcatcctctctggcccrctttctgtctggcatttgcctgacatattc

SEQ ID NO: 2905 - DNA, 61 bp, Homo Sapiens
ctgccaagacggaggagaggaggcagtgtcrtttttatttgtcacggtactttctgtgcac

SEQ ID NO: 2906 - DNA, 61 bp, Homo Sapiens
tgtcgtttttatttgtcacggtactttctgkgcaccatttagttgctgctggttctagtta

SEQ ID NO: 2907 - DNA, 61 bp, Homo Sapiens
tgggtcatggtcagaaaatgttaaaagtcaytggatgagagtatttctgaggtccctgaga

SEQ ID NO: 2908 - DNA, 61 bp, Homo Sapiens
tccacagtggctcccgggtcttgctctgccyatgttacagattaagagcaatccccatgtt

SEQ ID NO: 2909 - DNA, 61 bp, Homo Sapiens
aaaaggggaaaaaacatctcctactgtttgragaatggtttctggggcttagaataaaact

SEQ ID NO: 2910 - DNA, 61 bp, Homo Sapiens
tctttccctggggtgcctctgaggccgggakcaccctgtggcaaggaagattacggacatg

SEQ ID NO: 2911 - DNA, 61 bp, Homo Sapiens
aacagcacaggtttgcagagttctccaggayggcagataacaaccagagcacgtgtaccca

SEQ ID NO: 2912 - DNA, 61 bp, Homo Sapiens
aaagggccagagatgtagatcaatgccagcyatttcttgacgcttaaaaatctcatgcctt

SEQ ID NO: 2913 - DNA, 61 bp, Homo Sapiens
ctgacatggtgaaaaggacaaacgggctctstgggatctcttttataaaggccaatccagt

SEQ ID NO: 2914 - DNA, 61 bp, Homo Sapiens
agctaaaaaaaaataaaagcttagacacatrattttgagtaaagaaaacaaaaaaagccag

SEQ ID NO: 2915 - DNA, 61 bp, Homo Sapiens
agatcaaaggcagatgggcacttgagtctayagctcagaaaagaaactggagctggagata

SEQ ID NO: 2916 - DNA, 61 bp, Homo Sapiens
atgccagacatgaatacagagagtatattcrctcagggccactttacggataaaaaaggtt

SEQ ID NO: 2917 - DNA, 61 bp, Homo Sapiens
ctcagttttagaaacaaggaaatgaaagatsagagtttgaatgatttacctggggataggc

SEQ ID NO: 2918 - DNA, 61 bp, Homo Sapiens
acctttctatggtagtatccttccacataarctatgacttctattcccaggaaagcctgat

SEQ ID NO: 2919 - DNA, 61 bp, Homo Sapiens
ggggctctggaagatgacaagtcatggaatkaagttctgaggagggggacccggcacacag

SEQ ID NO: 2920 - DNA, 61 bp, Homo Sapiens
tccgtgctctctgttgttccacactacctgrtgtttaatgacaacactgtcagctggagac

SEQ ID NO: 2921 - DNA, 61 bp, Homo Sapiens
ttccaaacagtctcagtccccaggcgtgagyggccacagtgctgctgaacaatgcactttt

SEQ ID NO: 2922 - DNA, 61 bp, Homo Sapiens
ttaagaagctgatttgacactttggattatstgtagttcttcttccctccattgcagtgaa

SEQ ID NO: 2923 - DNA, 61 bp, Homo Sapiens
tcatttactttctgccaatggtggtgaggcmttatgggtttccccgtgcccagataaggag

SEQ ID NO: 2924 - DNA, 61 bp, Homo Sapiens
aaaagcactgctcattatttgtggttgaacmgttgtgtataaaatagaacatttgtgtgat

SEQ ID NO: 2925 - DNA, 61 bp, Homo Sapiens
tgcttctttatatgtaagagcaggcattccrtctacctaaattctgacaagcccagtgggc

SEQ ID NO: 2926 - DNA, 61 bp, Homo Sapiens
gtgtacactggctgtgctgtttctagcaccrtaaggcagtcatcattattgagccaggggc

SEQ ID NO: 2927 - DNA, 61 bp, Homo Sapiens
aataatttcacattatcttttaatggagcaractattacagagaaatcagagaaataatat

SEQ ID NO: 2928 - DNA, 61 bp, Homo Sapiens
caaaagtgctacagtatgcattaaaccgatyaaaataacgtagcatctttgaggacgagct

SEQ ID NO: 2929 - DNA, 61 bp, Homo Sapiens
ttggccattagcagcccttgatgttgtgatkatgttgttagtattgactgctctttcagga

SEQ ID NO: 2930 - DNA, 61 bp, Homo Sapiens
ctggcttatgcacttatggacttagcgtaayaatcctccagttacaggatttccttccttt

SEQ ID NO: 2931 - DNA, 61 bp, Homo Sapiens
aaatttcttctttcctatgtgtgtcttcacygtatacctctcaaagtaaagtactaaaacc

SEQ ID NO: 2932 - DNA, 61 bp, Homo Sapiens
ttattgaaaagatgtaaaatgtatgtgatgyatacacattgccacagagaatggagtttcc

SEQ ID NO: 2933 - DNA, 61 bp, Homo Sapiens
gaatggagtttccattcttgccctcaacatrcataagcgactctttcccaacatcattttc

SEQ ID NO: 2934 - DNA, 61 bp, Homo Sapiens
ggtgaaaattaagctcaataaaaaagatgasaaaggccgggacaaagggaaaggcaagaaa

SEQ ID NO: 2935 - DNA, 61 bp, Homo Sapiens
tacattctggtacagccacatgacagattaytgagccattaaaattatcctcagggtgagt

SEQ ID NO: 2936 - DNA, 61 bp, Homo Sapiens
ccagaaatatagcattttagtgcatttcacrtagtaacaagagctaacagctaatagatcc

SEQ ID NO: 2937 - DNA, 61 bp, Homo Sapiens
ccatgatgagggatgtaagagaactctgtayggtgttcacagaggactccagagagggaag

SEQ ID NO: 2938 - DNA, 61 bp, Homo Sapiens
gagtaaatcccacgacataagctggtatcastggttcgggggaaatagttccattctatga

SEQ ID NO: 2939 - DNA, 61 bp, Homo Sapiens
aattaccctgccaatgcatactttgaaataktattttgcctcatgtgtataactataaatt

SEQ ID NO: 2940 - DNA, 61 bp, Homo Sapiens
caaaatgtgtgtgtcatgattctagattgtsctaacctatccagcaagttcaaaactgtga

SEQ ID NO: 2941 - DNA, 61 bp, Homo Sapiens
atagtaaaaaggttgtatcagtccagcccasaagaacttgtcaaacaatacaaatttgttt

SEQ ID NO: 2942 - DNA, 61 bp, Homo Sapiens
tggaaagcatttgctctccattaaacttacygaaccttgacaaaccagaagggccaagaat

SEQ ID NO: 2943 - DNA, 61 bp, Homo Sapiens
cagttttgaattaggtttgatgtacacaggyagggctattatgatttcaaaagccgctctg

SEQ ID NO: 2944 - DNA, 61 bp, Homo Sapiens
gtgatgtgggaaagtggaagacccagaccargaatcagaagagctggattctagcaagtta

SEQ ID NO: 2945 - DNA, 61 bp, Homo Sapiens
cgtcatgaatccttaatgaagctggatagakttgaggagcaaccctcatcttttaggaaca

SEQ ID NO: 2946 - DNA, 61 bp, Homo Sapiens
atctttgctataaaagcggctcagggacttyattcagtaggtacttttgagttaaatctga

SEQ ID NO: 2947 - DNA, 61 bp, Homo Sapiens
caaaacctaataatgatgactgttttactartgatggttctgcgcctgtgaatacactgtg

SEQ ID NO: 2948 - DNA, 61 bp, Homo Sapiens
ggtccaaaatgtgacttgtaagtgagctgayaggaactcagaaaaaatgctgttgttgtaa

SEQ ID NO: 2949 - DNA, 61 bp, Homo Sapiens
agtccacactgactatgagactaccagaacrttcatttctcatgtgcctttcccttgataa

SEQ ID NO: 2950 - DNA, 61 bp, Homo Sapiens
tactgtgctacaatttaacctacttcctcgkattctgacctcaggatcagtgcaaacagct

SEQ ID NO: 2951 - DNA, 61 bp, Homo Sapiens
caaataagagactgatccataaaactataayagatctgaagaaattcccatcacctaggga

SEQ ID NO: 2952 - DNA, 61 bp, Homo Sapiens
aagatgaaacgtattctaaatgttcattccrgctaatctccattccttatcttgtttatta

SEQ ID NO: 2953 - DNA, 61 bp, Homo Sapiens
cacggtttcaagcgatcacataaagtgacayctatccaactctttttcttcaacttaccat

SEQ ID NO: 2954 - DNA, 61 bp, Homo Sapiens
gggttttctcctaacttctgacccttgaaaytaaaagcactttctccacctcctctgttcc

SEQ ID NO: 2955 - DNA, 61 bp, Homo Sapiens
ccaatctcctgttacagtgcccattactttstaccacagctatttatgtaaatatctattt

SEQ ID NO: 2956 - DNA, 61 bp, Homo Sapiens
aattgctatgtccagtgatgccttaagtgawgcaggtactaacatctttggaatgaacttt

SEQ ID NO: 2957 - DNA, 61 bp, Homo Sapiens
ccctaactggtgttcagtgggactaacaackgcctgggaaagctatttatcttaagcaggg

SEQ ID NO: 2958 - DNA, 61 bp, Homo Sapiens
ggaggcaatgcctatgctgaatggtaaggcmtaagtaggagttatccaaatgaagaaggaa

SEQ ID NO: 2959 - DNA, 61 bp, Homo Sapiens
gggtaaataatgaaagttctcttccacaccrtgttagccattttgagctttaatctggagg

SEQ ID NO: 2960 - DNA, 61 bp, Homo Sapiens
gaatttaggagactcatgcattgctgcattrttttagaaatggataaatgatttcgacttc

SEQ ID NO: 2961 - DNA, 61 bp, Homo Sapiens
ccacctgggtgtgcttaaaaagagacaaacrtggtaacgatcaaataccctagataaaatg

SEQ ID NO: 2962 - DNA, 61 bp, Homo Sapiens
attctttttaattataataaaataaataacrcttgacaacatagtcttacaataccataca

SEQ ID NO: 2963 - DNA, 61 bp, Homo Sapiens
ggtgccattatttgaatgcatgaaacttctracctataagacatgaaatacattagccagt

SEQ ID NO: 2964 - DNA, 61 bp, Homo Sapiens
ccaatgacaattttgagcttttcacgatagwtgttataatagactcttaggcaagttttca

SEQ ID NO: 2965 - DNA, 61 bp, Homo Sapiens
ggttcagacaatggtctgcaaaattgctgargaaagtcctggaatcatttttaaaacagta

SEQ ID NO: 2966 - DNA, 61 bp, Homo Sapiens
gccacttaataaataagggattgaagaatartggcttagagttggagagacagtatttagc

SEQ ID NO: 2967 - DNA, 61 bp, Homo Sapiens
tgcttaggaaacaaagacgagctaggagaaygggcttgaaaaaacagcatgcaagaggtaa

SEQ ID NO: 2968 - DNA, 61 bp, Homo Sapiens
ccatcaacatccaggcaagaccttccactcrcaaaaatattaggagttgccaaagatttat

SEQ ID NO: 2969 - DNA, 61 bp, Homo Sapiens
agttgattgatggtgtttttgagttcaactrtgtctttactgcttttctgcttgttggatc

SEQ ID NO: 2970 - DNA, 61 bp, Homo Sapiens
tttacaagctgccaggtgatttaaatccacrtagtctaccagccaaacttagagcaaacag

SEQ ID NO: 2971 - DNA, 61 bp, Homo Sapiens
cagaacctatttctccatctgtaaaatggarggataacaatgctcaccagataggattgtt

SEQ ID NO: 2972 - DNA, 61 bp, Homo Sapiens
cctaacgttcctgtgtttgatagcatcctcyttctacttagggcctgtgtgttagtaatgc

SEQ ID NO: 2973 - DNA, 61 bp, Homo Sapiens
agctagcataaaatattattgagaaaattcsctttaccacacttagagaaaagtttttttc

SEQ ID NO: 2974 - DNA, 61 bp, Homo Sapiens
ctattttgcccaggtgaagctggaccgcttrtactcttctttgagaggagcagggtatgac

SEQ ID NO: 2975 - DNA, 61 bp, Homo Sapiens
gaaaatcttaatctcccatttggccctttcmaaagtataagcacagattacttttcctatc

SEQ ID NO: 2976 - DNA, 61 bp, Homo Sapiens
tgaacatgtcatggctcaggaatcagcttcrttaccgtgatattctttcattgatgggttt

SEQ ID NO: 2977 - DNA, 61 bp, Homo Sapiens
acaaaatgttattgaaatattcggtcttaasatagaaaacctatcaacctttagtgtctgt

SEQ ID NO: 2978 - DNA, 61 bp, Homo Sapiens
tttcaaatgaagcatgaagttacatgcaatraactgaaataaatttgatgttgcctttggt

SEQ ID NO: 2979 - DNA, 61 bp, Homo Sapiens
tcaacatcctttcacaatacggctcttgacraggtaaaatctagaggagtagtttatagct

SEQ ID NO: 2980 - DNA, 61 bp, Homo Sapiens
agatcaattttttaaataagtacaaatctcyttcttaatcggggtgactactggactaaag

SEQ ID NO: 2981 - DNA, 61 bp, Homo Sapiens
agttgcacacacaattatgggtgtctattaygtgccactatacaagtttctggggtacaat

SEQ ID NO: 2982 - DNA, 61 bp, Homo Sapiens
gcaacagatgacattatcaaaaatatgtctyttgaaaaccaagtcaagtacctagagatga

SEQ ID NO: 2983 - DNA, 61 bp, Homo Sapiens
tttcagtggacttaaactcagtttccgctgrtgctatgtaaagcatccacgatggttttat

SEQ ID NO: 2984 - DNA, 61 bp, Homo Sapiens
agatacgcatctatatttatgtcacacatayctgttttatttatgtatttatgcaccttta

SEQ ID NO: 2985 - DNA, 61 bp, Homo Sapiens
gtcttatttcagagaaccgatcttcaagttyggagattctttccttagcttggtgtattct

SEQ ID NO: 2986 - DNA, 61 bp, Homo Sapiens
agagagagtgtgtgtatgtatagtacagcargagtaacaacagggttgatattccacagtt

SEQ ID NO: 2987 - DNA, 61 bp, Homo Sapiens
ggtagtaagaagcacaagggaataagcctgygatgcaataatttaatctgcctaaaattgt

SEQ ID NO: 2988 - DNA, 61 bp, Homo Sapiens
agggaataagcctgcgatgcaataatttaayctgcctaaaattgtctcctagcttgccaac

SEQ ID NO: 2989 - DNA, 61 bp, Homo Sapiens
cctgcttagttttcttaaaatgagaatctayagttgtatttgctagtatctgcctaaagaa

SEQ ID NO: 2990 - DNA, 61 bp, Homo Sapiens
acttcctaagtgtttgagaggctgtcaagtrgggagtactggaaaaatccagggttctgaa

SEQ ID NO: 2991 - DNA, 61 bp, Homo Sapiens
accatgactagacttgagatacagtgctaayaggagacagcagaacatccctacaaactca

SEQ ID NO: 2992 - DNA, 61 bp, Homo Sapiens
tttttagaagctggccagttagaactgtacwttatgtagctctactgttcatttgtggtct

SEQ ID NO: 2993 - DNA, 61 bp, Homo Sapiens
gtatgtctttcagtggaagttcaggcaaggrttggaattgtaagtactaggggtccagaga

SEQ ID NO: 2994 - DNA, 61 bp, Homo Sapiens
ctgaaaagaattcctgtcttcaaggatacarccagttacatctgacttgctctgcacatct

SEQ ID NO: 2995 - DNA, 61 bp, Homo Sapiens
tcagataaactaaaaacactttctgagagtrtccatgtcctaaaggctttaagtacttcta

SEQ ID NO: 2996 - DNA, 61 bp, Homo Sapiens
gggtcatgagtttatcttcatcttttggtaygatttttttaggctcataatgcttgtaagt

SEQ ID NO: 2997 - DNA, 61 bp, Homo Sapiens
cctgatctggtccctgctacattctccagakgcgttcttcagcttctgtctccagccttct

SEQ ID NO: 2998 - DNA, 61 bp, Homo Sapiens
ttctgtttaacaattaatattttatctgagmctattgtgcactgtaatttttatgaactta

SEQ ID NO: 2999 - DNA, 61 bp, Homo Sapiens
cacctggtaagtgtccctagcaacagagacrtaagaggttgagagaaaaatcattagaaag

SEQ ID NO: 3000 - DNA, 61 bp, Homo Sapiens
gttagcagtcttaggatcttagactcaaagratgatagctgggagcctctcagaaatcctc

SEQ ID NO: 3001 - DNA, 61 bp, Homo Sapiens
cagtggctatcaaactggatgacatggcttkaacaggtgaactgcacactggagaggagaa

SEQ ID NO: 3002 - DNA, 61 bp, Homo Sapiens
cacttacgcttactggtttatccagctttayctcttttctcacaccaatgtacattgtttc

SEQ ID NO: 3003 - DNA, 61 bp, Homo Sapiens
aaggactttctcaaaaagacaacagataaaycttcattaaatctacattgggttcttaagg

SEQ ID NO: 3004 - DNA, 61 bp, Homo Sapiens
cagctctgacagttatgatacctggtgatargtgcaaaatagaaatatactcaagatacaa

SEQ ID NO: 3005 - DNA, 61 bp, Homo Sapiens
tgtttgctgaaaacactttggccactcctayattggaagtgatttcgaagttaatttttgg

SEQ ID NO: 3006 - DNA, 61 bp, Homo Sapiens
tttcctatagcctagtctggatcagtggttygtgttactcatctgtgcctggcacacagta

SEQ ID NO: 3007 - DNA, 61 bp, Homo Sapiens
tctggaagggctttcaaattaatggctttasaaatcacaacagcttcatggcaaccaacaa

SEQ ID NO: 3008 - DNA, 61 bp, Homo Sapiens
gacattttattttataagtaaaatcagaagscataatagccaacctggccaacttttgaaa

SEQ ID NO: 3009 - DNA, 61 bp, Homo Sapiens
agatcagacaacttttacagaagtctctaarcaggatatgatgttgacaaccccaatctct

SEQ ID NO: 3010 - DNA, 61 bp, Homo Sapiens
ccatttaatccaagagggtccaccatgactktcgaatctaaaatactcttttcacagataa

SEQ ID NO: 3011 - DNA, 61 bp, Homo Sapiens
cccatcccacttctttgaaaggcttgaaatrctttactctccaatacccactgtctgcttg

SEQ ID NO: 3012 - DNA, 61 bp, Homo Sapiens
aaggctgtctccattctgccacatggtttcygtgtttcaccaagatgcccctaatggaggc

SEQ ID NO: 3013 - DNA, 61 bp, Homo Sapiens
cagctcatggaggaccttgtaattaattagragggctttggatttttttttttttttccga

SEQ ID NO: 3014 - DNA, 61 bp, Homo Sapiens
ttctgcttgggtttcattaaatttctttaawctttgagctgagatctttcaatagttttca

SEQ ID NO: 3015 - DNA, 61 bp, Homo Sapiens
aaaaataaaggggagaggcctacaaagctgytttacagatagctacattagctggtcagtc

SEQ ID NO: 3016 - DNA, 61 bp, Homo Sapiens
ctggggaggtagttatttgaaatgttttttsagtacagagtagtgtggcatctgaaatggc

SEQ ID NO: 3017 - DNA, 61 bp, Homo Sapiens
ccctaaaagcctattattggggcttcaaacwttccatgagcgttctcagtttccgacgtca

SEQ ID NO: 3018 - DNA, 61 bp, Homo Sapiens
gctattctcatgtcttgttttttatttgatkttatgtggcagttagaaggtagccctgaag

SEQ ID NO: 3019 - DNA, 61 bp, Homo Sapiens
gcatagtttcctagaaatattaaccatgaaygtgtgttgaaaatgattgaatgttcacaat

SEQ ID NO: 3020 - DNA, 61 bp, Homo Sapiens
aaaggaaccagtctagttatgaaacaaacayaggtaaccttgactctaggactttttattt

SEQ ID NO: 3021 - DNA, 61 bp, Homo Sapiens
tgcccaagggcatgggacaagatctactggygtttgccaaaaggagtccttcacgttgact

SEQ ID NO: 3022 - DNA, 61 bp, Homo Sapiens
ctggcttctggctgctcagggtccacctcaygcatgctgagccatcagcttccacgtcacc

SEQ ID NO: 3023 - DNA, 61 bp, Homo Sapiens
agatataaatatatctacatctatgactatrtctacatatcttccaaaaaagtcatcaaaa

SEQ ID NO: 3024 - DNA, 61 bp, Homo Sapiens
ttttaagcacatactccccaggccattctascactgtgtatggcaattagactgctggctt

SEQ ID NO: 3025 - DNA, 61 bp, Homo Sapiens
aatcattttacctgagcactgattctgggtrctggcaaaagcagtccccggagcagctcct

SEQ ID NO: 3026 - DNA, 61 bp, Homo Sapiens
tgcagattctgacaacctgacgttgtacagrtaatcacattagctcaaaatatttcaggtg

SEQ ID NO: 3027 - DNA, 61 bp, Homo Sapiens
gttatatgaatcatgtaggatgctgcttaaygctatatttatcatggatgaaggcatgttt

SEQ ID NO: 3028 - DNA, 61 bp, Homo Sapiens
ctctagccccataatctttgatttctcttgyccacatggatggttaccttttctgaaatgt

SEQ ID NO: 3029 - DNA, 61 bp, Homo Sapiens
gagcctattctgccttataagaattgtttgwaagattgaaggacaaatgaagtcatacaac

SEQ ID NO: 3030 - DNA, 61 bp, Homo Sapiens
gctcagaaacagatatggtgctatcaggaamgcaaggccaatatctgaatattgcagcaga

SEQ ID NO: 3031 - DNA, 61 bp, Homo Sapiens
aatggggcatctcagaatcgtaaactccccyagttgtagttcctttcgatgttggtcgttg

SEQ ID NO: 3032 - DNA, 61 bp, Homo Sapiens
agactaaagcctgtagatgaatatctggtarcacctcacagaggagagacctaaagctgtg

SEQ ID NO: 3033 - DNA, 61 bp, Homo Sapiens
tgtgtttattattcaatactgtccatattcraagaaccattcattgagcttctattttact

SEQ ID NO: 3034 - DNA, 61 bp, Homo Sapiens
tgttagattaatctctgtaaactaaggtatygtgatgccagacgtaacattcaggtctcct

SEQ ID NO: 3035 - DNA, 61 bp, Homo Sapiens
tttctctttgtctctcttctgttgtagcccytccctcaccgctaagccttcaccctgactc

SEQ ID NO: 3036 - DNA, 61 bp, Homo Sapiens
ggggggtatttctacacctccatgcagttgkaaaggaaaggtagtccttggaatttttatt

SEQ ID NO: 3037 - DNA, 61 bp, Homo Sapiens
aaaaaaacctatgtctagattagagtcaggkgcggtctccttattgtcagtgtctgctttc

SEQ ID NO: 3038 - DNA, 61 bp, Homo Sapiens
cctggtgtgccaggtactgctttgcttacaytgtttcaacttttgtatgtatgtccttatt

SEQ ID NO: 3039 - DNA, 61 bp, Homo Sapiens
atctctgcttagatgacatctctgatgttcyttccttgacaaaactttctaaagctacccc

SEQ ID NO: 3040 - DNA, 61 bp, Homo Sapiens
ttctagcccccatagcttaccaagcagatgwtgcttcttctgtgagatggaaacttccctc

SEQ ID NO: 3041 - DNA, 61 bp, Homo Sapiens
tgtggtgttgtcccatgagggttaaataaasagttcaggatataatctttaaaccaaacaa

SEQ ID NO: 3042 - DNA, 61 bp, Homo Sapiens
atttgagaacctttcagtccccaacaaacayggatggttggtcaccttggttttaagtcct

SEQ ID NO: 3043 - DNA, 61 bp, Homo Sapiens
aagcattgttattcctttggtatttctttasgtgataaacttgacttgctagggaattggg

SEQ ID NO: 3044 - DNA, 61 bp, Homo Sapiens
tgaagtcttgaaaggtaacagagtctatatyttccaacatttatgattggctcacctgaca

SEQ ID NO: 3045 - DNA, 61 bp, Homo Sapiens
ttagtttattatctgttagtattcttacacygagaaaaaaattcagtaaaaagtctcattt

SEQ ID NO: 3046 - DNA, 61 bp, Homo Sapiens
gggtcgtaatcctcccgacacggccagtttmaggcaggtcgaattgctccagttcctgagt

SEQ ID NO: 3047 - DNA, 61 bp, Homo Sapiens
tctttttgagcccacacatattgttggttaytttttagtgtaagtagccactcttttctat

SEQ ID NO: 3048 - DNA, 61 bp, Homo Sapiens
catggtctgcttgatgatccttgctcttctygaatctggagggaaatgattgatgaaatgt

SEQ ID NO: 3049 - DNA, 61 bp, Homo Sapiens
tgtttttgttacttgtcatgtgtccatttaractctacctggcttctaggcacaaatggca

SEQ ID NO: 3050 - DNA, 61 bp, Homo Sapiens
ctgataaacacctttatcatgaattgaaagkttaagagttacagaagatgtctggtttttt

SEQ ID NO: 3051 - DNA, 61 bp, Homo Sapiens
ctaaaccatttatataaatgatatggtttaytatgaacacctgcttttcttctgtggatgt

SEQ ID NO: 3052 - DNA, 61 bp, Homo Sapiens
gggaagaaggcacccaaacatggttgatgasaatgtaaactatcctagcccttaatgaggg

SEQ ID NO: 3053 - DNA, 61 bp, Homo Sapiens
cacaattctagacactcttctttagttccasctctggcagagaccttctcaccatggttga

SEQ ID NO: 3054 - DNA, 61 bp, Homo Sapiens
tctattccagtagcactcatggaagataccmctaagaaggagcaatggcattgctgagggg

SEQ ID NO: 3055 - DNA, 61 bp, Homo Sapiens
gaaaagctttttattttcttttttatgtcartcttctatgaccatgtcttacttttataaa

SEQ ID NO: 3056 - DNA, 61 bp, Homo Sapiens
tacgactcccaggccatcctttttctacagratgtataagaatatgtgttgcaacaaattc

SEQ ID NO: 3057 - DNA, 61 bp, Homo Sapiens
tcatcatgacgcttgtctttggtagcctatsatatgccaagctctttatttccattacctc

SEQ ID NO: 3058 - DNA, 61 bp, Homo Sapiens
gtccaccggcactgagttcaattgcatgatytcacaagaagagacaggcttccttagttat

SEQ ID NO: 3059 - DNA, 50 bp, Homo Sapiens
tgtttaaagatagttcaaartcaaatgagcaatacaggaactctaaatga

SEQ ID NO: 3060 - DNA, 61 bp, Homo Sapiens
aacctaaacaagaactaagatcttctaagtsactactcgtaagcctagtaaggcacaggag

SEQ ID NO: 3061 - DNA, 61 bp, Homo Sapiens
aggacaatggtatcgatcctgcttttctatkaagagaggataattacaataagatttgctc

SEQ ID NO: 3062 - DNA, 61 bp, Homo Sapiens
tctgctggttgacagctaatgagggagaagrtaagactggaacctaccaaggtctcttatc

SEQ ID NO: 3063 - DNA, 61 bp, Homo Sapiens
aggaggggaaggaaaagggttagtgtcctcrtttggctaaactgtcaaatacctcaaggca

SEQ ID NO: 3064 - DNA, 61 bp, Homo Sapiens
gttgtttgagccgctgaaagacccatgtacmtctacacaggtgggggaaagatggcccctg

SEQ ID NO: 3065 - DNA, 61 bp, Homo Sapiens
tgtcaatgagatggcagattgctcagatgcytgttgttagctttgaaatgccatctaagcc

SEQ ID NO: 3066 - DNA, 56 bp, Homo Sapiens
agatcagtagatactcaaatctttatcctayagggagtgctgacattggcatgaag

SEQ ID NO: 3067 - DNA, 61 bp, Homo Sapiens
tcattttttaaaaagctaggacttaggaaargaggtgatttgcttttgttttccatttgtt

SEQ ID NO: 3068 - DNA, 61 bp, Homo Sapiens
gaagccaggaggcaaagaagtccattgatgycatccctaaaagccagcctctcgacacaga

SEQ ID NO: 3069 - DNA, 61 bp, Homo Sapiens
actcttttcaccgcagagcccatgaccacargtttttcattccgttcaggaaactactctg

SEQ ID NO: 3070 - DNA, 61 bp, Homo Sapiens
aaagagtaaactttccacgtggagtcttttytgttgacttatgacctaagtagctgggtag

SEQ ID NO: 3071 - DNA, 61 bp, Homo Sapiens
tgatataatatagtgcttgtgggtctttaastacatggcaccatgtagttaaaaagtgcat

SEQ ID NO: 3072 - DNA, 61 bp, Homo Sapiens
aaactctacaaatattccaacataattagaytcttctggtgtacaaaccaccgtaagactg

SEQ ID NO: 3073 - DNA, 61 bp, Homo Sapiens
gaatttgaagcttctcctatgacagactctrtgtgcaatttattgttggcctggttaagca

SEQ ID NO: 3074 - DNA, 61 bp, Homo Sapiens
aagcatgactgaagggaaagatatctcatgsggggagagttcctcatacaagagtatggag

SEQ ID NO: 3075 - DNA, 61 bp, Homo Sapiens
gcagagccactgaatttagtgattggtaacraaatagttaaattgagagtgctagaatgtc

SEQ ID NO: 3076 - DNA, 61 bp, Homo Sapiens
caaaacttgcgtcataggtaaaaaccaactrtttgctgaaataggctgtaccagtctggct

SEQ ID NO: 3077 - DNA, 61 bp, Homo Sapiens
gtggttttagacaactaagttgactttgtayaagctcaagctgcctttgttttgtgtccag

SEQ ID NO: 3078 - DNA, 61 bp, Homo Sapiens
tacaagctcaagctgcctttgttttgtgtcyagtgttgcaagtttggcagtgaggtttggg

SEQ ID NO: 3079 - DNA, 61 bp, Homo Sapiens
ttaacatcatggcatagccaaaaaaccccartgtaatgcaatactctttatacttagatat

SEQ ID NO: 3080 - DNA, 61 bp, Homo Sapiens
atgaaatgaaataaaaatcactcgtggtttyagtatgtaggcgagaaaaacaaaaacaggt

SEQ ID NO: 3081 - DNA, 61 bp, Homo Sapiens
tctctgaggggcgggcgctgctgatagacaygtgaaagtctagcctgcagcagatgtgagt

SEQ ID NO: 3082 - DNA, 61 bp, Homo Sapiens
tgccattcccaaactatcagtgtggaaagtygtgatttagtttgaccccaagctctacttc

SEQ ID NO: 3083 - DNA, 61 bp, Homo Sapiens
ttagagcactaaagggcctgatgccggcaayagaggctgagcagatgctctaaggagtgac

SEQ ID NO: 3084 - DNA, 61 bp, Homo Sapiens
agagggtggaccaggggcacctctgacaggragagttaaggagcagtgagctcccttccac

SEQ ID NO: 3085 - DNA, 61 bp, Homo Sapiens
aagaggcagcttacagggatatttaggggastttgttcagcatctgaatgcagagtatgag

SEQ ID NO: 3086 - DNA, 61 bp, Homo Sapiens
ccgtaaaaccctgcgaatgtactaaaaaccrctgaaatgtacactttaatgcgggaattat

SEQ ID NO: 3087 - DNA, 61 bp, Homo Sapiens
cttatatttgaagttggtacatgggagcccyttaaaagtcttaataatacaaggtgaataa

SEQ ID NO: 3088 - DNA, 61 bp, Homo Sapiens
tcatcctatagagacagcgttttggaaaggracatataaaaatgattccacccttacatga

SEQ ID NO: 3089 - DNA, 61 bp, Homo Sapiens
accagttgacatatttttccatacatactcygaaggtgccatcactaattaatgcttttgt

SEQ ID NO: 3090 - DNA, 61 bp, Homo Sapiens
gatcagtgtagcaactaatctgaaatcttamaaggacaccaacaatcacaaagtaacccag

SEQ ID NO: 3091 - DNA, 61 bp, Homo Sapiens
ttttattgaaggctttttcatctaggctaaygagagatattggtgtataatttaggttttt

SEQ ID NO: 3092 - DNA, 61 bp, Homo Sapiens
acacatagataaaaaaatgggaaaacacacrtaatttcactagcataaaacgtagttggtt

SEQ ID NO: 3093 - DNA, 61 bp, Homo Sapiens
aggttcgtgagttcatgtcccgctacagacrttgggattcaggacacttctctaggcctca

SEQ ID NO: 3094 - DNA, 61 bp, Homo Sapiens
ggttttaagatgcctgacttgaatcacattygtgagattctacatgtgcacggggctatcc

SEQ ID NO: 3095 - DNA, 61 bp, Homo Sapiens
attatttctacttttcataacaacccagctrgccaaaagtaccactatttttatgagtggt

SEQ ID NO: 3096 - DNA, 61 bp, Homo Sapiens
tgctgcctcccgtgttccccaccatgctgarggtgtatgggcatcctggatgtgcgtgata

SEQ ID NO: 3097 - DNA, 61 bp, Homo Sapiens
gagaggcccttcctgtgccttgagtgtgggygtagcttcaggcagcagtcactcctcctta

SEQ ID NO: 3098 - DNA, 61 bp, Homo Sapiens
gcccttagaggtctctggtcatcagggaagkgtcttcacacacagagcttgtattttaatt

SEQ ID NO: 3099 - DNA, 61 bp, Homo Sapiens
ctgtattctttgtctccacttgttttccacrttcaacagggagctgtcatcccaggcccgc

SEQ ID NO: 3100 - DNA, 61 bp, Homo Sapiens
agtagtgcaaaatagactcaaagcaactagraggaagaatgtgatagaaatctaaattaat

SEQ ID NO: 3101 - DNA, 61 bp, Homo Sapiens
taggatctttgcatgttcgagagggctctgytgtgttccactgtagctggggattttgatc

SEQ ID NO: 3102 - DNA, 61 bp, Homo Sapiens
agtgagcagagatcctatcagccatgctacygatgggccaccaagccactgtgaaggtctc

SEQ ID NO: 3103 - DNA, 61 bp, Homo Sapiens
acctacttccaaagtggttggagatgagaartgactgtatgtcttcccgtgaagctaacag

SEQ ID NO: 3104 - DNA, 61 bp, Homo Sapiens
gactgtgtaagtatcctgttcccccacaaaygttcacgcagtggtttcagcaaccattgat

SEQ ID NO: 3105 - DNA, 61 bp, Homo Sapiens
tgacttagtggcagaatctgggtttctccartgtgtgacaatcaggccaacatcagaatgc

SEQ ID NO: 3106 - DNA, 61 bp, Homo Sapiens
ggccgagtgcagtgcccaagtatagcctgartacttccccaacagctgctccagaagtggg

SEQ ID NO: 3107 - DNA, 61 bp, Homo Sapiens
cactcgggtctgttagtctcattaggaaaayctgaccaacagtgtaagtggtagaacagag

SEQ ID NO: 3108 - DNA, 61 bp, Homo Sapiens
gaagggaatttcttgggaaggtaaggaggargaaatccagattccaagtggaataactggc

SEQ ID NO: 3109 - DNA, 61 bp, Homo Sapiens
acctggccaccccaccctaatcttttattaygcagaaggtttctacgtggccagcgcagcc

SEQ ID NO: 3110 - DNA, 61 bp, Homo Sapiens
ggtgtgtgtttcatagttcttcgttcatcaygctatttcatcatcagtgtcttctttttaa

SEQ ID NO: 3111 - DNA, 61 bp, Homo Sapiens
acccagcagagttatattttgaaatattgcrgtattagaaaagcacattatatatggcagt

SEQ ID NO: 3112 - DNA, 61 bp, Homo Sapiens
attaaaccagtctgcatcagctacagtgtamgtctcagaaacagatctgaaaccccagctg

SEQ ID NO: 3113 - DNA, 61 bp, Homo Sapiens
ttggttgcatttgaggtgacatcctctaatyttcctaagcacagtggggcctcctggaaac

SEQ ID NO: 3114 - DNA, 61 bp, Homo Sapiens
tccctcatcctccgggtgtgtgtatttggtwtgggatttgtcaggctgggtagctgagggc

SEQ ID NO: 3115 - DNA, 61 bp, Homo Sapiens
atgaacccttttccagggcctggatagggcyattccctaggtccatgtgggctgggagttc

SEQ ID NO: 3116 - DNA, 61 bp, Homo Sapiens
gtggcagtggtggtcatttatttgttcacgygttctttcattcaataagcatttaatgatt

SEQ ID NO: 3117 - DNA, 61 bp, Homo Sapiens
gatcacaggcataaactggccagtatagccmaaggcatcatgaggattggatcgcttccac

SEQ ID NO: 3118 - DNA, 61 bp, Homo Sapiens
ctaccttgcattatggttgtttgtgtgcaaygtcttaatacacataggcatatacatacat

SEQ ID NO: 3119 - DNA, 61 bp, Homo Sapiens
aggaaaaaaagttctgctaccatgttaaaaraatcatgcaatgctaagtatgatacctgaa

SEQ ID NO: 3120 - DNA, 61 bp, Homo Sapiens
tttggaatattacagaggttaaatgatgagragtactagctggtcaagaagaggagaggca

SEQ ID NO: 3121 - DNA, 61 bp, Homo Sapiens
tcattagtagaggatcacaaggttccaggcrctctaaaggagaaatttaggaaggaacttc

SEQ ID NO: 3122 - DNA, 61 bp, Homo Sapiens
aggaggacttttcttacccttcacactaacsaggaatccatgagatgtacatatagctatt

SEQ ID NO: 3123 - DNA, 61 bp, Homo Sapiens
ggccccaggttattgagcaggagttgagggrttggataccatggatagtgcacatcttgaa

SEQ ID NO: 3124 - DNA, 61 bp, Homo Sapiens
tatatgacattgacttggggatgaactctcmtttcccatgctagcaaacatcttggctgca

SEQ ID NO: 3125 - DNA, 61 bp, Homo Sapiens
ataaaccttgctatcaaagcaattcagacaygtaaactagccatgatataaagaaaaaagt

SEQ ID NO: 3126 - DNA, 61 bp, Homo Sapiens
gtcattgtaaaataccatctgcctgtcaagyattgttttaaaacattaaatttgctaaata

SEQ ID NO: 3127 - DNA, 61 bp, Homo Sapiens
tgtgggattaccagtccgggtatcagctctytgttaatcttccagttcttgcatttcttat

SEQ ID NO: 3128 - DNA, 61 bp, Homo Sapiens
gtgctttgatttattgtatcctccttcatayctgtggtgttagtttcttcccaatattgcg

SEQ ID NO: 3129 - DNA, 61 bp, Homo Sapiens
tcctttcctcttctgttttccagggtcttaygaatgcggaatctgtggcaagaagtacaag

SEQ ID NO: 3130 - DNA, 61 bp, Homo Sapiens
agcctgggctatataggtcattcagtacccrccatagagccagatcttgtgtggagagaga

SEQ ID NO: 3131 - DNA, 61 bp, Homo Sapiens
tatttcacctgttattgttattgtacaaatytttcacatcatctcccaggtctggcctgac

SEQ ID NO: 3132 - DNA, 61 bp, Homo Sapiens
aggccattaaaatgcaaatcaggtctgagcyttgaggtggccccacctctcccaagcatct

SEQ ID NO: 3133 - DNA, 61 bp, Homo Sapiens
acatttatttgtgtatgtttaatcaactatrttcctggagtaaatcccacttggtcatggt

SEQ ID NO: 3134 - DNA, 61 bp, Homo Sapiens
atttcatggaataccctttggagataaatgrttcagcaagcagaggtttctggccccaggc

SEQ ID NO: 3135 - DNA, 61 bp, Homo Sapiens
ctgggcgccaggtcaggtgctggcaattccrtggtcaacacaagcctctgctctccagggg

SEQ ID NO: 3136 - DNA, 61 bp, Homo Sapiens
ggggctgaattctgaccaatctcgtagcttstttgctgatcactgtccatttccttgtctc

SEQ ID NO: 3137 - DNA, 61 bp, Homo Sapiens
tgtggctcctaactgccttccttctctacaytgctttacggtataattcctcagggctgtc

SEQ ID NO: 3138 - DNA, 61 bp, Homo Sapiens
tgccttttccaaaaggagtattcttttagtkaggagatcttccacctgctgcaccttcttt

SEQ ID NO: 3139 - DNA, 61 bp, Homo Sapiens
aagcaaagtacacctaactctggctatccgyttcaatggctcacaagaacctgggcctcca

SEQ ID NO: 3140 - DNA, 61 bp, Homo Sapiens
tggtacttgctgtcttttgtgatttactgaytttgctccagggaaagctctaaaccattaa

SEQ ID NO: 3141 - DNA, 61 bp, Homo Sapiens
aaagcacggagaggaaccaagaatgtgctcrgaaaaaaatccttcctcactgaaaccagga

SEQ ID NO: 3142 - DNA, 61 bp, Homo Sapiens
gacagtcatcgccagaagctaaggagagagktgtggaatagattcttcctcacagctgtca

SEQ ID NO: 3143 - DNA, 61 bp, Homo Sapiens
ttctcatagttctccactgaaactctgtccytatcaaacaataactctcgactcccccaca

SEQ ID NO: 3144 - DNA, 61 bp, Homo Sapiens
aaatttatgcaaaggttccaaactacatccyaacagcagtggttcgttcctgagccccacg

SEQ ID NO: 3145 - DNA, 61 bp, Homo Sapiens
gaataagaacatgatgtagtggaaagatgaygggatgtagaccctataaatgtccaactga

SEQ ID NO: 3146 - DNA, 61 bp, Homo Sapiens
ccctaggcctgtctgcctccaaaataaaaastgttcctctgcccaagagtcacacagcaag

SEQ ID NO: 3147 - DNA, 61 bp, Homo Sapiens
accctggggctcaacaacttcatgaaagggkctctggaagcactggggagcctgccccctc

SEQ ID NO: 3148 - DNA, 61 bp, Homo Sapiens
ctaaaaggtcaagagaaattgaaagtaacckcactctcctaacaacagccttctctcttgg

SEQ ID NO: 3149 - DNA, 61 bp, Homo Sapiens
gagtgcagaagggccccaggaaagaagaccrtgaagatcgtactggctttgcaaaacttct

SEQ ID NO: 3150 - DNA, 61 bp, Homo Sapiens
ttgaacctttgaatcattctcaacttagcastccaggcagctactcttagttaaatagtgg

SEQ ID NO: 3151 - DNA, 61 bp, Homo Sapiens
ctgcagaaataaagcactgatgcaaaacgtsgtacatacaatgccattttctgcatcactg

SEQ ID NO: 3152 - DNA, 61 bp, Homo Sapiens
gagaaacgatgaaggggacctcggcacaatycaacctgagtcaggcagacatgtaaataaa

SEQ ID NO: 3153 - DNA, 61 bp, Homo Sapiens
gtaggggctgtcgggggaattacacgtgccrtagaagtacatagaaggagcatccagcttt

SEQ ID NO: 3154 - DNA, 61 bp, Homo Sapiens
atgccttgccttctttttaattctccctatkccccgtgctttgcctggctctccacctttc

SEQ ID NO: 3155 - DNA, 61 bp, Homo Sapiens
gagactgtggtgctgtcctgcaggcacatcrtggaagaacttatcagacccatgactacaa

SEQ ID NO: 3156 - DNA, 61 bp, Homo Sapiens
ctactttgggtcctcatgattttagatggcmtggtagataaccttactttgatagctaagt

SEQ ID NO: 3157 - DNA, 61 bp, Homo Sapiens
tctcagtggcacctgaggatgattcccccamgtaaatgtatgctagaggattacttttttt

SEQ ID NO: 3158 - DNA, 61 bp, Homo Sapiens
agtagaaggagtaattactcatgatttgcaktttgtccaaagattatctcatggtcagaag

SEQ ID NO: 3159 - DNA, 61 bp, Homo Sapiens
cagatgggggagaatgtcagcaatgcaatgycactaaggtaataactaagccattgcatcc

SEQ ID NO: 3160 - DNA, 61 bp, Homo Sapiens
cccttgaggagctccccatcacccgcagcartggtagggaccagagtgggggacagagaga

SEQ ID NO: 3161 - DNA, 61 bp, Homo Sapiens
tcttcagagactgttatgcctgagatgtctktgcttaatattcaaagagagggtgtcactt

SEQ ID NO: 3162 - DNA, 61 bp, Homo Sapiens
aagtatcaacatcttgtaacaccctctttaygagttaacaacaagcgttttagtgcattaa

SEQ ID NO: 3163 - DNA, 61 bp, Homo Sapiens
agtggctggatgacaaaggaggaatcagcargtgtttttctctgtcccctgtgtgcagggt

SEQ ID NO: 3164 - DNA, 61 bp, Homo Sapiens
atttcctcctccataaactggtatccacaaygccaaccttgtgaacgctgtgagaatgcgc

SEQ ID NO: 3165 - DNA, 61 bp, Homo Sapiens
tagagaaaaacaggagcaagataagaacaaygtactgaaaaggaaattggatgagggcctg

SEQ ID NO: 3166 - DNA, 61 bp, Homo Sapiens
ggagtggaaaggagtacccttaagtaggacrtgagaagagcctgaagaaaggcagaggaca

SEQ ID NO: 3167 - DNA, 61 bp, Homo Sapiens
attcagtattttgttagatctgttgatgtayggttttataactaaaattaaaaagatttgg

SEQ ID NO: 3168 - DNA, 61 bp, Homo Sapiens
aacagtttattattagacatgtaaaaacacytttgtcactctgactggtaaagaatggcat

SEQ ID NO: 3169 - DNA, 61 bp, Homo Sapiens
tccccttagaaatccaaaaaggattgcatcraagttctgctatgtgagcagcatttttcag

SEQ ID NO: 3170 - DNA, 61 bp, Homo Sapiens
tcactgcaacctccgcctccccaaattggckattctccttcctcagcctcacgagtagctg

SEQ ID NO: 3171 - DNA, 61 bp, Homo Sapiens
gaaattcaactgtgcaggagtgtgtacacaragttgaaagtttttccatgagctctctcca

SEQ ID NO: 3172 - DNA, 61 bp, Homo Sapiens
cggaagccagcccgggagtgagcagcatccraccgccgcctctgacacgggatgggatgca

SEQ ID NO: 3173 - DNA, 61 bp, Homo Sapiens
cccactcaatccaatccagcagacggtaccrtgaagctagagcatgccaagcactgagctg

SEQ ID NO: 3174 - DNA, 61 bp, Homo Sapiens
ttcctggaaggagggggccggccagcattasggctgtcacgggcgctgcttaatgtcaagc

SEQ ID NO: 3175 - DNA, 61 bp, Homo Sapiens
atggcatgcatccaccactgcagtattatayggcatagcctcactgtcctaaaaatgccct

SEQ ID NO: 3176 - DNA, 61 bp, Homo Sapiens
cctgccgatgacctcgatgttggagatggcrtagaagtacttgtagaggttctcccgctgc

SEQ ID NO: 3177 - DNA, 61 bp, Homo Sapiens
ccacataccaggtaacatcccaggtatccartaacgtcccaggtaacagatagcatcccag

SEQ ID NO: 3178 - DNA, 61 bp, Homo Sapiens
ttacatcctcatccacatccacaaaaccccrtttccatgtaaggtcacattcataggcact

SEQ ID NO: 3179 - DNA, 61 bp, Homo Sapiens
gaactcagagtctgaggtagctgccctggcrtatttaacaacatcagccgagacgtggagt

SEQ ID NO: 3180 - DNA, 61 bp, Homo Sapiens
cagctcagtctgtaaatttcctttatctccytcgctcagtcttaccctcagttccactctc

SEQ ID NO: 3181 - DNA, 61 bp, Homo Sapiens
agcaccgtgggtgccttcagaattctgaaarggccctggatggtatcgggtagagccgctg

SEQ ID NO: 3182 - DNA, 61 bp, Homo Sapiens
ctgtttctacactgtctggaagaagaatggrcattgttacctcaatatgggaccaccaggg

SEQ ID NO: 3183 - DNA, 61 bp, Homo Sapiens
catgtggctgcagtactccccgtagatcagragcctggacggtgcacacacacgcacacac

SEQ ID NO: 3184 - DNA, 61 bp, Homo Sapiens
ggcatgatccctacattcagactcaactgtkggagatactgggatacagaatgagcaagat

SEQ ID NO: 3185 - DNA, 61 bp, Homo Sapiens
caaacacctccccttcgtctctcatgtctgmctatcctgtgtgcagaaaggggtaactgag

SEQ ID NO: 3186 - DNA, 61 bp, Homo Sapiens
tggcggagggactggtggggcctcagaggcrttagttatcctctagaaagtactcagggtg

SEQ ID NO: 3187 - DNA, 61 bp, Homo Sapiens
tgacaagcgaccatcgagtagtgataattayaaaacatgtgcaatcacagcttcacattca

SEQ ID NO: 3188 - DNA, 61 bp, Homo Sapiens
ccctgatgggtcttgggacagaggacataarggggaaactgaggaagccagagtcacttca

SEQ ID NO: 3189 - DNA, 61 bp, Homo Sapiens
gaaagcgttttaaaattagtggtggatacayggccttgtgaatacactgaaaacccctgca

SEQ ID NO: 3190 - DNA, 61 bp, Homo Sapiens
tcagcctcccaagtttagagttaattacacrgatcccaaccataatcacagccggccaggc

SEQ ID NO: 3191 - DNA, 61 bp, Homo Sapiens
gacctgggaggagccctgcctgttggtgacratctacatggatggggaaggttgggccagg

SEQ ID NO: 3192 - DNA, 61 bp, Homo Sapiens
ggccaatgagggctgaagcttcggcctgtgrccaagacaccatgggcagtggaatgagcaa

SEQ ID NO: 3193 - DNA, 61 bp, Homo Sapiens
ggggccgggcagcaccggacgtcaaggtatygccgagaacgagatgcaccatcatgatggg

SEQ ID NO: 3194 - DNA, 61 bp, Homo Sapiens
agaaagagaattccctcaccctatttcgtarccgcattttagcaacagtatctctaaccca

SEQ ID NO: 3195 - DNA, 61 bp, Homo Sapiens
atggcagaaaactcaacgcttcctttgcacratgattaaaaagtcagagctgcttgagatg

SEQ ID NO: 3196 - DNA, 61 bp, Homo Sapiens
agaggtaattaaggtgaaatgaggtcattcrgttgggccctaattcaataggactaaggcc

SEQ ID NO: 3197 - DNA, 61 bp, Homo Sapiens
tgctgtgagcttccaggctggtggtggttcrttacgcaacagaggtagcacgtacaccagg

SEQ ID NO: 3198 - DNA, 61 bp, Homo Sapiens
gggattagggcccaccctcatggcctcactktaccttaatgaccgctttaaaggcctcgtc

SEQ ID NO: 3199 - DNA, 61 bp, Homo Sapiens
acaggggttaggctggtgcttacctcccccsacttctggacagctgccctgggacctctgc

SEQ ID NO: 3200 - DNA, 61 bp, Homo Sapiens
tgcatgtttatggagcatttgtttttccttkcgtgtgaatgctctgttcgtattctttgct

SEQ ID NO: 3201 - DNA, 61 bp, Homo Sapiens
ggtcagaacgaaagcctctcagaggaaagaraagggcatgagtcaaagagaaagtcggggg

SEQ ID NO: 3202 - DNA, 61 bp, Homo Sapiens
gccacaggcggagaaagggatgtctcagcaycctgggtggaatcgacagccactgtgtccg

SEQ ID NO: 3203 - DNA, 61 bp, Homo Sapiens
gcgcacagctgagggatacacgggccctcargtcaggcagctcccagcagcctggcatggc

SEQ ID NO: 3204 - DNA, 61 bp, Homo Sapiens
caaagaaataatggagaaagcctctaccccrgtgaagctattttttgcttaaagagaaacg

SEQ ID NO: 3205 - DNA, 61 bp, Homo Sapiens
tgaatggccagagttttcagcaatttttctscaccctgactcgtcctgcgtgagctgaggt

SEQ ID NO: 3206 - DNA, 61 bp, Homo Sapiens
gccatgagcatgaggaggcaggcagcacttyatgttccaacttcctttcctttggataaac

SEQ ID NO: 3207 - DNA, 61 bp, Homo Sapiens
gataagggatcagcctaagtgcttgtcaacrgatgaaaggatacagaaaatatggtgtata

SEQ ID NO: 3208 - DNA, 61 bp, Homo Sapiens
aaggggcagccggcccaagccagcccgaggygtccaggtgtcagcccccatggtccctgcc

SEQ ID NO: 3209 - DNA, 61 bp, Homo Sapiens
ccagtcgcagtgaagactgcgcacaggagcrtgttcataggagcatggagaaaggcccagt

SEQ ID NO: 3210 - DNA, 61 bp, Homo Sapiens
tcctcaacaccgacaccccccagccaaaacrgtacattataacactgcatccagtatggaa

SEQ ID NO: 3211 - DNA, 61 bp, Homo Sapiens
aatgtgagcaggagcgcatcggatccttgckctgggcaaacttggcttgcataatttagat

SEQ ID NO: 3212 - DNA, 61 bp, Homo Sapiens
gccactggattggaggttctcgtgaggacaygttttgggatgcaggtatttgaaaaaggga

SEQ ID NO: 3213 - DNA, 61 bp, Homo Sapiens
ttgcaggcaccactcctccatactagttttygtatattttttagagatgggggttcgctgt

SEQ ID NO: 3214 - DNA, 61 bp, Homo Sapiens
ctgataaagcacatttctaggaacagggccratttcctctgccttccactgtgaacggtaa

SEQ ID NO: 3215 - DNA, 61 bp, Homo Sapiens
agatatcaaacccatcctgaggaagctcccrcgtatcaagaaacacttgttaaatggtgat

SEQ ID NO: 3216 - DNA, 61 bp, Homo Sapiens
tttggaaaggattgatggtttaatccgaaartgtaagtaattggatgtgcagtgtggcctg

SEQ ID NO: 3217 - DNA, 61 bp, Homo Sapiens
cttactccggtaagaggaagctaacgctgayggttgtttgtttagagggatctgtagcaaa

SEQ ID NO: 3218 - DNA, 61 bp, Homo Sapiens
aaacgcatagctgagggctgtaaatcgggayggatcagtcggtctgcccaccagccgtgag

SEQ ID NO: 3219 - DNA, 61 bp, Homo Sapiens
taccagaaatccagctcgcgtaaacatgggraaaaggtggcatccaaatacaccgagagga

SEQ ID NO: 3220 - DNA, 61 bp, Homo Sapiens
cttactaaaagtcaaacatcaacattagtastaactctggcattgtagcgatatctccaag

SEQ ID NO: 3221 - DNA, 61 bp, Homo Sapiens
tactggtgttcctcacattcttgagcatacygtcctttgtgggtctcagaaatatccgtgc

SEQ ID NO: 3222 - DNA, 61 bp, Homo Sapiens
atactaaaatactcatatgtatcatttttcrtatatcacacacatactataaattggtaag

SEQ ID NO: 3223 - DNA, 61 bp, Homo Sapiens
tcaccagcctggccaacatggcggaactccractttattaaaaaataaaaaaaattagcca

SEQ ID NO: 3224 - DNA, 61 bp, Homo Sapiens
tagctatccatcatctatcaatcaatcactstatcttgcaatggaggaattaactgtgatg

SEQ ID NO: 3225 - DNA, 61 bp, Homo Sapiens
gcaatcctggcttataaagctaaactttgtsacttgcagggaaagagtgcagctgtgtgtc

SEQ ID NO: 3226 - DNA, 61 bp, Homo Sapiens
tgtctatttaaaaaaaatcacaagagctccrtatagtcaggaaaatgttccagcacacctg

SEQ ID NO: 3227 - DNA, 61 bp, Homo Sapiens
tccatttttacacatccacctgtttgccatkaagtcacaacattttatcaaaatatacaca

SEQ ID NO: 3228 - DNA, 61 bp, Homo Sapiens
ctcttcacctgggcgccaactgctgatcaaygaaatgcttgttgaatcaggggcaaacgga

SEQ ID NO: 3229 - DNA, 61 bp, Homo Sapiens
gaggacataaatggaaatgtacagacctatmttttttaaagcacggatttagttagtttct

SEQ ID NO: 3230 - DNA, 61 bp, Homo Sapiens
ccatagccaaggccagcgggagatgggggcrcggaatgtgaaggactgaagattgtgtgac

SEQ ID NO: 3231 - DNA, 61 bp, Homo Sapiens
tcagaagtcctttgagtttacatcgcttgcygaaggactgtatcttgtgtgtctctgaaat

SEQ ID NO: 3232 - DNA, 61 bp, Homo Sapiens
gtactaaaacctgaaaaatgtcctaattctraaaatgatttatcaggattatacaagttaa

SEQ ID NO: 3233 - DNA, 61 bp, Homo Sapiens
ctcagattcctacagatggcttaagaaaatrccagactccagggaaaggtgaaagaataag

SEQ ID NO: 3234 - DNA, 61 bp, Homo Sapiens
gaattatcataaaatccagaagtccatacamtttctcttgcacttaggatagcattttttt

SEQ ID NO: 3235 - DNA, 61 bp, Homo Sapiens
gatcacgtgtcatcagatagagaagggccaraattgtagtataaaaggttctttagggatg

SEQ ID NO: 3236 - DNA, 61 bp, Homo Sapiens
ccacctgtgggttgcagaagggtaacctacrgatgcccgattgtcctttttccctggatta

SEQ ID NO: 3237 - DNA, 61 bp, Homo Sapiens
gagggtgggggacttactgtatgtataatcrtgagggaaactggcctctaattttcctttc

SEQ ID NO: 3238 - DNA, 61 bp, Homo Sapiens
agggcacggaatagaatggcgtaggccagcrcgtgaattggtggtaaactgaaggtcatcg

SEQ ID NO: 3239 - DNA, 61 bp, Homo Sapiens
ggatattctaatatccttctgcactaaggtrtagtccagtaagaatctaccaggtatactc

SEQ ID NO: 3240 - DNA, 61 bp, Homo Sapiens
cagttacaccggaaataagatatttcctgcrtttacagacatctacatgcttgcctttttt

SEQ ID NO: 3241 - DNA, 61 bp, Homo Sapiens
acatgactagagtccaaaatggaaacctcaragtttaagagtaggttattacaggggacct

SEQ ID NO: 3242 - DNA, 61 bp, Homo Sapiens
atcaaaggcctgagcttcctagttggaaacragtggactcaaattgcagctctaccacatt

SEQ ID NO: 3243 - DNA, 61 bp, Homo Sapiens
aggttgtcgatgtgttttgtgagatgtaaaygaagtggaattcccttctgatgccaccagt

SEQ ID NO: 3244 - DNA, 61 bp, Homo Sapiens
ctcctataacaaaaggcaggttaaaggcacrgtcctccagaatgttacatctacccaagac

SEQ ID NO: 3245 - DNA, 61 bp, Homo Sapiens
gagtgcctctcaaactttttcacaccaagakacttacagaaaatgacaatatttgtaagtc

SEQ ID NO: 3246 - DNA, 61 bp, Homo Sapiens
ctcaacctccaaaataaatgtacaatcactscagaattattaaccttcataaactctatga

SEQ ID NO: 3247 - DNA, 61 bp, Homo Sapiens
agtggtcccagatcatgaggtgctaattgtrtaggaaaagacagagatagataaacaggag

SEQ ID NO: 3248 - DNA, 61 bp, Homo Sapiens
ttgacaagaccatcaacatcagacaataaarggcagtgaccactgagagacgggaaacaag

SEQ ID NO: 3249 - DNA, 61 bp, Homo Sapiens
catacacacacacacacaccctcacgcccayagcaggtcagcttcctgacactttgaacag

SEQ ID NO: 3250 - DNA, 61 bp, Homo Sapiens
ggggaggggcaaaaaaggtaatggaaggatkgttctgtagtttaatgaaacgtacgttaat

SEQ ID NO: 3251 - DNA, 61 bp, Homo Sapiens
tggaagataaatcagatgttggttatggacraagtatttcttcttcatcttccttaagaag

SEQ ID NO: 3252 - DNA, 61 bp, Homo Sapiens
gaataaaatattttaactgcattcgtctgawaagccattgggaatattttatgttaaaaag

SEQ ID NO: 3253 - DNA, 61 bp, Homo Sapiens
tttcctttctgattcttctttctctgaccakctcttagagtcctgtcttcattctacatgt

SEQ ID NO: 3254 - DNA, 61 bp, Homo Sapiens
gaaagatagagagatcctatgtaatctttaygcaatttccttcaacagtaacttcttagaa

SEQ ID NO: 3255 - DNA, 61 bp, Homo Sapiens
ggagtagcatcaaatatacctagaattactsaatctcagagatggggtttcctttttcttt

SEQ ID NO: 3256 - DNA, 61 bp, Homo Sapiens
ttatctgcatagatagtgtagtggtcaagtyggcttttcgtatatttatcacccaaataac

SEQ ID NO: 3257 - DNA, 61 bp, Homo Sapiens
tagagggaagggtagaagaaaggacctgacrggagttcaatctaggaagaacaaaaagaag

SEQ ID NO: 3258 - DNA, 61 bp, Homo Sapiens
gattagtgatgttgagcattttgtgaatgayatttttctggtgcatctaacataaattcca

SEQ ID NO: 3259 - DNA, 61 bp, Homo Sapiens
aattgattgagataatgggtactccctctgygtgttcaaactaaccttccctttgtggttg

SEQ ID NO: 3260 - DNA, 61 bp, Homo Sapiens
cttcaaaacaccgttactgaaccaaacttargtctgcccacccaatgaaacaaagccaaac

SEQ ID NO: 3261 - DNA, 61 bp, Homo Sapiens
aatgaataaatgatgagatctgcctttgagragacacacaaataaaagtaaaattctaatt

SEQ ID NO: 3262 - DNA, 61 bp, Homo Sapiens
tttttcaaagatagatcagtgcttgatctgmagttgcttctcttctagatgcctttctctt

SEQ ID NO: 3263 - DNA, 61 bp, Homo Sapiens
atttattctaaaaatatctgtgacattgagwgaaataggaatcatctcagtatgtatatat

SEQ ID NO: 3264 - DNA, 61 bp, Homo Sapiens
ttataagcatcatagaccaaatgctgaaagrtgtaaattcctggtgggtttgggtgaaaaa

SEQ ID NO: 3265 - DNA, 61 bp, Homo Sapiens
ggtaaatagaagatttctgataagctttcamattgatacacagacgatcccttactacttt

SEQ ID NO: 3266 - DNA, 61 bp, Homo Sapiens
aatatatgagtgaagcaggacttgatgaaakaaaggcagaggatggcagcaatgtggcaaa

SEQ ID NO: 3267 - DNA, 61 bp, Homo Sapiens
aattataattctatacgataaatgcaaacawggaagtatacacaggttacagaaacacaag

SEQ ID NO: 3268 - DNA, 61 bp, Homo Sapiens
gaagcattaacataaacctaaacctctatamtgttcctgtggctttgacttttaatagatt

SEQ ID NO: 3269 - DNA, 61 bp, Homo Sapiens
gctcttcatggagacgttcagatatattccmacaagttgggagcagaagatcctggaatat

SEQ ID NO: 3270 - DNA, 61 bp, Homo Sapiens
ccagttgtaatcaaggattccatcttttccyaattccaagacagataaatcattactcatc

SEQ ID NO: 3271 - DNA, 61 bp, Homo Sapiens
ttggtatcactgcagcttaatcactcacagwtgtgtgcactttcacaaacatttgtttcat

SEQ ID NO: 3272 - DNA, 61 bp, Homo Sapiens
ccttaatgggctcattagtagactggactcrgtggagaaaacaatctctgagatatatcaa

SEQ ID NO: 3273 - DNA, 61 bp, Homo Sapiens
aaagatgatggaaacacttagatgttcttgygaaaaggtagatggacttactcattttaag

SEQ ID NO: 3274 - DNA, 61 bp, Homo Sapiens
tcaagaacatcaaacatcttgaaatcaaatyatgttggcaagtcagagattgcagcacctt

SEQ ID NO: 3275 - DNA, 61 bp, Homo Sapiens
aaatcaaatgagagaatgtatgttaaatgaygtgaaaggaaaaaagtggtcatcatgtgtg

SEQ ID NO: 3276 - DNA, 61 bp, Homo Sapiens
gcacatgttgccaaaacaactctgtgcaccraactcagtctaccctgcatggactgttgct

SEQ ID NO: 3277 - DNA, 61 bp, Homo Sapiens
ctttctgactcactgattggcttaatttctyctcaaattggacaatactagatggaaaata

SEQ ID NO: 3278 - DNA, 61 bp, Homo Sapiens
tctttgtcatattttcttgcctgacgctcaytatttggtttgatgcaacggacaaaatgag

SEQ ID NO: 3279 - DNA, 61 bp, Homo Sapiens
ttctataattctactcctaattctgagtgtyctttgctaatatgtcctccaatccccacat

SEQ ID NO: 3280 - DNA, 61 bp, Homo Sapiens
aaagaaaagaagacatctgtagttacccagmgtgcaccgatatgcagccaggaggaaggca

SEQ ID NO: 3281 - DNA, 61 bp, Homo Sapiens
tttattaaaaatgtttgcgggcccatcaacscagataaaacaatctaccagttattaatta

SEQ ID NO: 3282 - DNA, 61 bp, Homo Sapiens
aactggcttttgaggactgtaatccatgcgmgatgacagcccaaggaaaatgacagaagtg

SEQ ID NO: 3283 - DNA, 61 bp, Homo Sapiens
attccttccaaggccttcttcgtgggacccrtgactgcttttcagcctcttttcttgccct

SEQ ID NO: 3284 - DNA, 61 bp, Homo Sapiens
gaggatgtgttgaaacccagagaatcagttrgaaataagtttcccacctcgcaggcagaaa

SEQ ID NO: 3285 - DNA, 61 bp, Homo Sapiens
tcttttgtgaatagtcaactaattttacaarccagtaatctgactattaccttgacttctc

SEQ ID NO: 3286 - DNA, 61 bp, Homo Sapiens
cagccatactcctcagaacactgtgctgctwacatcgtaactagaagactgttaaataata

SEQ ID NO: 3287 - DNA, 61 bp, Homo Sapiens
ctcaatcgactgattagtccatcgcaaggcytatctaattaacttctagattcctctaaaa

SEQ ID NO: 3288 - DNA, 61 bp, Homo Sapiens
aggaaatatacttcatggtaaaggatatagratgaattaaggaagggagacaagaaaacag

SEQ ID NO: 3289 - DNA, 61 bp, Homo Sapiens
tgagttcctgctcttctttaactttcttgcrtatggctctgtcttatcatggaactcacct

SEQ ID NO: 3290 - DNA, 61 bp, Homo Sapiens
tacgtttcaggctcttttgtgtgtgtcactktggggtttttatgaagtaggctgtcttgtt

SEQ ID NO: 3291 - DNA, 61 bp, Homo Sapiens
acatttgaataagactccaaaacgttgaatrtatgcatggatcataaatctaaataacata

SEQ ID NO: 3292 - DNA, 61 bp, Homo Sapiens
acaaattaattacatttcatttcatgagacrcataacacaagtgatcttatctctagttct

SEQ ID NO: 3293 - DNA, 61 bp, Homo Sapiens
cattaactaagctgagaaataataagaatgytgccaagacatggtgtttgagagatgggtc

SEQ ID NO: 3294 - DNA, 61 bp, Homo Sapiens
ggagtgaggagagagtacaggatctgaaccrgatggaaccagtttgagatcctggctctta

SEQ ID NO: 3295 - DNA, 61 bp, Homo Sapiens
ttgagtaaattcctctcttcttgaggtcacrcaaatagtctcggtttccttggcccactag

SEQ ID NO: 3296 - DNA, 61 bp, Homo Sapiens
aatacatacaagaagaagccctgtactcaastcatctcccacaaatgaataaatgcatgta

SEQ ID NO: 3297 - DNA, 61 bp, Homo Sapiens
ctacaaaattatatgtgaaactgcacaattrgaattacatttccaatacattcgcttacat

SEQ ID NO: 3298 - DNA, 61 bp, Homo Sapiens
aggatgccaaggacagaataactgtgttggsatacgttaatacaatatgcatacataaatg

SEQ ID NO: 3299 - DNA, 61 bp, Homo Sapiens
gaactaaaactggctctcagtttacaccatsactaacaagaaagctttacataatccagag

SEQ ID NO: 3300 - DNA, 61 bp, Homo Sapiens
catacacttaagaaatatggaaagcaaagtmcaaaattatagagcagaaaaaatttaaatc

SEQ ID NO: 3301 - DNA, 61 bp, Homo Sapiens
caatcctctaatcatttcaggggggacgtamctggttgacatgaaataaatggggctgaaa

SEQ ID NO: 3302 - DNA, 61 bp, Homo Sapiens
aagtattgattatgtatgtggtcagtgttgyaggctaacatagcatttaagaagtaaaccc

SEQ ID NO: 3303 - DNA, 61 bp, Homo Sapiens
tgatgaaaaatgacacaggtcattgtcactmtaaatccatattttgtaatttcaactgggt

SEQ ID NO: 3304 - DNA, 61 bp, Homo Sapiens
ccgtctgtgctgggtccgcatatacttctcrgacttggccttcctcacctctaaacagctg

SEQ ID NO: 3305 - DNA, 61 bp, Homo Sapiens
tggctagacatctccaggtctcaagaacatygcagcatgccctttgtgccagctgtttggg

SEQ ID NO: 3306 - DNA, 61 bp, Homo Sapiens
tctgctgtcaccatcttgaaattctgataayttctgaacagaggccctgcgtgctcatgtt

SEQ ID NO: 3307 - DNA, 61 bp, Homo Sapiens
acaatgatgcaggcacctttggggaagtcarctacttcttcagtgatgaccctgacaggtg

SEQ ID NO: 3308 - DNA, 61 bp, Homo Sapiens
tctcaccgctgatgcggtccatgcggaaggycatgtccttgttgccctcggtgatgtagta

SEQ ID NO: 3309 - DNA, 61 bp, Homo Sapiens
ttgccttatcccaatcctccagcatttaatygggttgaccctcaaaaccatgagcttttga

SEQ ID NO: 3310 - DNA, 61 bp, Homo Sapiens
tctttgtgaaacatcctgattttttaattgrtcgtgcaggaaatatttcttgagtacctcc

SEQ ID NO: 3311 - DNA, 61 bp, Homo Sapiens
aaacaacaacctatatatggagggcccaagygacagaatgagagcccctgctgcccagagc

SEQ ID NO: 3312 - DNA, 61 bp, Homo Sapiens
atggtctcccggtccagctccacgtccttcyggacccttagcaccccctccacaggagaga

SEQ ID NO: 3313 - DNA, 61 bp, Homo Sapiens
ttaccgtgagggcctcagacaacgggtcccygccccgggcagctgagatccctgtctacct

SEQ ID NO: 3314 - DNA, 61 bp, Homo Sapiens
gcaagaacaactatttattgagcagctgtgwtacactatattgagctatattgagcgctga

SEQ ID NO: 3315 - DNA, 61 bp, Homo Sapiens
ccacactactccctgctgtgtcacatcacawcttacgagtcacttgtttctttcggttccc

SEQ ID NO: 3316 - DNA, 61 bp, Homo Sapiens
aatggctgcagcatcaacattattggtttgyttgggcaaatatgctttttgcaagactgaa

SEQ ID NO: 3317 - DNA, 61 bp, Homo Sapiens
gaactccttacttcacctgtgtccttgggakttcaccagctgagctgaccagcagtctgag

SEQ ID NO: 3318 - DNA, 61 bp, Homo Sapiens
cctccagaaagactgccgatcaccacaggtyctgtccagcctccatccaccatggcagcca

SEQ ID NO: 3319 - DNA, 61 bp, Homo Sapiens
acaccaaaacaagctttgatgaaaagacccrtttccctgctgtcccttgattttcaggcaa

SEQ ID NO: 3320 - DNA, 61 bp, Homo Sapiens
ccctgggcctggtagttaaagactgacccgsacttaatcggttatgttatctatagattac

SEQ ID NO: 3321 - DNA, 61 bp, Homo Sapiens
ccctttggctgtgttgaaaagaagttctccrgtgctcaaaccgattttattccttggaacc

SEQ ID NO: 3322 - DNA, 61 bp, Homo Sapiens
ccatggccatgatcaacaaagtgctatgggkacatggctaaagaatcaggagcccatctgg

SEQ ID NO: 3323 - DNA, 61 bp, Homo Sapiens
tgggaagatgggagaaaatggagactcagaygaacaggctttaaaactaatacatgaaaaa

SEQ ID NO: 3324 - DNA, 61 bp, Homo Sapiens
agttttaggtgacttcctcaaattccccaawcctaaattctatttgcttattttacttctg

SEQ ID NO: 3325 - DNA, 61 bp, Homo Sapiens
actgcagtgggatggtttcactcctcatttwctaaaacactgcatctgaaggtttctacaa

SEQ ID NO: 3326 - DNA, 61 bp, Homo Sapiens
actcttaatgcttgtctggagatttttccaygtgatttgggagatgatatagggcatgttt

SEQ ID NO: 3327 - DNA, 61 bp, Homo Sapiens
ctttgtttcattctgactgcttagtgcctastcttgggctaagggatgctgacaagctagt

SEQ ID NO: 3328 - DNA, 61 bp, Homo Sapiens
attgcttaaggccacacagctaaaatggcckccaagtcaggatttgaactctgatcctgtg

SEQ ID NO: 3329 - DNA, 61 bp, Homo Sapiens
cttaagaagaatttttccatgatgtgatgayagaatttgcagccagcaaaggggatcatag

SEQ ID NO: 3330 - DNA, 61 bp, Homo Sapiens
attattaacccttctgcacagcatacccatytttgcttctgggtccacacttgcacaccta

SEQ ID NO: 3331 - DNA, 61 bp, Homo Sapiens
ccgccatccctgtcatcaagagcttcaccaycttcttgtctagacaagcttgaatcccaag

SEQ ID NO: 3332 - DNA, 61 bp, Homo Sapiens
agaggagactacttaggcaatgagatgaaaytggcacgtttacctgcctctgattaaacag

SEQ ID NO: 3333 - DNA, 61 bp, Homo Sapiens
gaggagttagaagaggaaacagctggggccrtaagtcaggcgagttcacacccaaccacct

SEQ ID NO: 3334 - DNA, 61 bp, Homo Sapiens
gtatcttggcaggcaggtggcgcaatgattraggaggatacgatgagaccacagcattatt

SEQ ID NO: 3335 - DNA, 61 bp, Homo Sapiens
tcagtgaatggtgatgatgatgcagatgacygaaaatgataatggtaatgatgacaaattc

SEQ ID NO: 3336 - DNA, 61 bp, Homo Sapiens
ctggcataactgggacagtcatatcggctcmtttaagcattcccatcaccccagccatgcc

SEQ ID NO: 3337 - DNA, 61 bp, Homo Sapiens
atctgtccttttacatggtgacagatttcaytttttgttatctttctctttatcttttgct

SEQ ID NO: 3338 - DNA, 61 bp, Homo Sapiens
aggtttttcagcctgcctttcagttaggccracggagcataaggggaaattaatgcatagt

SEQ ID NO: 3339 - DNA, 61 bp, Homo Sapiens
ttcaagtgtccatgccagaggggaagatgtrggagcatactagaagttaatgagccaggaa

SEQ ID NO: 3340 - DNA, 61 bp, Homo Sapiens
caccgcacccagccttgacaggcttttccartacaccatgtcatatttcatttttgccaat

SEQ ID NO: 3341 - DNA, 61 bp, Homo Sapiens
gtggtattctagtggatggggaatttttcartgaatatacaaaatctccaaggccttctgc

SEQ ID NO: 3342 - DNA, 61 bp, Homo Sapiens
gttgttggaagatggatgaaattttgcttcwtgtcaatttgaggaaatgcactgttactga

SEQ ID NO: 3343 - DNA, 61 bp, Homo Sapiens
attgacatgaagcaaaatttcatccatcttscaacaacctgtcattgttaccccctctaaa

SEQ ID NO: 3344 - DNA, 61 bp, Homo Sapiens
aacaagtgcaaagtgtctactttctgccagrcattgtacaagccaactgtcctgaggcggg

SEQ ID NO: 3345 - DNA, 61 bp, Homo Sapiens
tcatatttagtggcaaggcactgtagcttckgaagtcgggcttgtccatcgttaaagcctg

SEQ ID NO: 3346 - DNA, 61 bp, Homo Sapiens
aatgtttctaaaaagtagatgcattcatttmtttccctggcatttcttgactgcttactct

SEQ ID NO: 3347 - DNA, 61 bp, Homo Sapiens
cctggatctctaattcactacttgaataaarctagtcatttgctaccttaaacaggaaata

SEQ ID NO: 3348 - DNA, 61 bp, Homo Sapiens
tgtcttaactctgttgttctctcctaaaatraagttgtgctttgagccactctatctaaaa

SEQ ID NO: 3349 - DNA, 61 bp, Homo Sapiens
gggtataggaacaaaacagtcagcaaaactkccaaggtgcttgcagatcaaagtgaagata

SEQ ID NO: 3350 - DNA, 61 bp, Homo Sapiens
actccaagttccatctccttctctccattcyttcacctgctttccgacaggtttcattctg

SEQ ID NO: 3351 - DNA, 61 bp, Homo Sapiens
tatgacttagtcctgtgagttgcattgaaarattgatctaagcacctcttttgtgttggaa

SEQ ID NO: 3352 - DNA, 61 bp, Homo Sapiens
tatgcagtctgatatccacctgactcgagayagctcctgatgggatagttacaacttaagc

SEQ ID NO: 3353 - DNA, 61 bp, Homo Sapiens
ttagaaaatatcaagagagctagtcacagcwtaagagttgctcacttctccaaactcaaac

SEQ ID NO: 3354 - DNA, 61 bp, Homo Sapiens
atgtaggctgggggtcttgttgcattcttgrgcttgaagccttcaggctcaatgattgaga

SEQ ID NO: 3355 - DNA, 61 bp, Homo Sapiens
tcatcccaaaggagtgactggaatcaattayctagcaaacaatttggtgctgaaaagagga

SEQ ID NO: 3356 - DNA, 61 bp, Homo Sapiens
gacatttccttatgtaaaagatacggtgtayggtaatagcgtccaatcattaattgtgaac

SEQ ID NO: 3357 - DNA, 61 bp, Homo Sapiens
tgtagaatgagttgggaaacactgcatgctmtatctatacctcccacccactttgaagaga

SEQ ID NO: 3358 - DNA, 61 bp, Homo Sapiens
ggcctttgggtagtttctccctactcttacrgaattgcctttatctctactacactgttcc

SEQ ID NO: 3359 - DNA, 61 bp, Homo Sapiens
cactggtaatcccctcgcagagctgccactyactgagcctcaccttgtacccacctggggc

SEQ ID NO: 3360 - DNA, 61 bp, Homo Sapiens
tcaaccgccttctagacatccacctgaatgyttctcaggcatcttaaactcaacgtgtccc

SEQ ID NO: 3361 - DNA, 61 bp, Homo Sapiens
atccctttactctccacctcccgccttatcrttgctcacctacaactgtacaacaaacacg

SEQ ID NO: 3362 - DNA, 61 bp, Homo Sapiens
gcattcctaagacagaaatttgccaaaagaytgttgtaagtttaatgagggaagagtccag

SEQ ID NO: 3363 - DNA, 61 bp, Homo Sapiens
agcattcaaattggtttacattgtgaaattytgacttgctcttacatatagaaatcatgtc

SEQ ID NO: 3364 - DNA, 61 bp, Homo Sapiens
ggcaaaagaatccccaaagtgatgcaaagtmatccgagggacaggagatgaaccagaaaag

SEQ ID NO: 3365 - DNA, 61 bp, Homo Sapiens
aagaaaaaattctaggagacaagctaaaaaygccactgacagtcatgtccattagaacatg

SEQ ID NO: 3366 - DNA, 61 bp, Homo Sapiens
gacctaaaacaaagacaaacggatcctcttygggtgctttttcatccagctgtggcaataa

SEQ ID NO: 3367 - DNA, 61 bp, Homo Sapiens
agctgtgtctgctgtcacattggctccacaytggggctcttacaaatatgtgtcacatcta

SEQ ID NO: 3368 - DNA, 61 bp, Homo Sapiens
tccacctttcttgccatttgcttccttctcwtgaatatgggtaattaaagattctggttgc

SEQ ID NO: 3369 - DNA, 61 bp, Homo Sapiens
tcctacctttttttgggttgctgaatccagmcattgcagatggattttcaaatggatacat

SEQ ID NO: 3370 - DNA, 61 bp, Homo Sapiens
ccaaatatggcggccctaagactccaaaagsaagattccaagtgaaccaggtgtaagatct

SEQ ID NO: 3371 - DNA, 61 bp, Homo Sapiens
atgtgagtttataaaatggaacaattagggrgtgatgtaagtgctgaacaaaagaaggaac

SEQ ID NO: 3372 - DNA, 61 bp, Homo Sapiens
ttgaaacaaaaattgtaacactatctgatgyggttctaaacgtatgcacaggaaatactca

SEQ ID NO: 3373 - DNA, 61 bp, Homo Sapiens
tatcccccatgtatagcccagtggccagaayatcatagtcatttaatagaggaagaaagga

SEQ ID NO: 3374 - DNA, 61 bp, Homo Sapiens
ccaactggaccagcactccactggctgataytgcccatcacagcacaccaagaggccatga

SEQ ID NO: 3375 - DNA, 61 bp, Homo Sapiens
aaatgctaaaggacttcaggataaaaaatgrtaattgtggactgcagtggttgggaagact

SEQ ID NO: 3376 - DNA, 61 bp, Homo Sapiens
ttacctgatttcctgccactaaagctacagygaatcagctgggcatgctagccaccaagga

SEQ ID NO: 3377 - DNA, 61 bp, Homo Sapiens
cctacattgtgcttggggaaacagagcataragaaatcaatcatgacactattgaagagtt

SEQ ID NO: 3378 - DNA, 61 bp, Homo Sapiens
acagggccaatcatcgtatgattaattctcrgagcagtcctttgacccttgtgagttaggt

SEQ ID NO: 3379 - DNA, 61 bp, Homo Sapiens
aagaggttaaaaacttacctcactaggaagytgatgacctaggttatgaactcagatttga

SEQ ID NO: 3380 - DNA, 61 bp, Homo Sapiens
tacaaagtcagaataacccacaaaatgtccratcaaagcaggtgtactctctgcactccag

SEQ ID NO: 3381 - DNA, 61 bp, Homo Sapiens
gtcggacccaaatctgtggttaagcacactytccaggtgattctggtgcacatgaatgttt

SEQ ID NO: 3382 - DNA, 61 bp, Homo Sapiens
ttgctattttaccagctaatatgcttttgtgycatttattgctctgtatgtctgtgactgc

SEQ ID NO: 3383 - DNA, 61 bp, Homo Sapiens
ccacattggttcccatttagtttctcaaacrtgccatgaactctctagtctcagggctttt

SEQ ID NO: 3384 - DNA, 61 bp, Homo Sapiens
catgaagcttataatttatagccttggttcracatggaattgtttaacattgcctataact

SEQ ID NO: 3385 - DNA, 61 bp, Homo Sapiens
aaagcagatacttataatgacaacatcctgmatcaaagaaagattcccttaactctttttc

SEQ ID NO: 3386 - DNA, 61 bp, Homo Sapiens
ttctatgcttacccatctgtttttttcccastttgctcgtctctgtactttgttccatagg

SEQ ID NO: 3387 - DNA, 61 bp, Homo Sapiens
cacctggtgtacacatgtcctctccggctgycccgtttcactccttgttcgttgaagttgc

SEQ ID NO: 3388 - DNA, 61 bp, Homo Sapiens
tgttaggtaccttcacttatataagcccttwaatcacaccagcctacggactgattattca

SEQ ID NO: 3389 - DNA, 61 bp, Homo Sapiens
tttttctttataataaattgaagcctattarttgaaaggtgattgtgtggtttatctgtat

SEQ ID NO: 3390 - DNA, 61 bp, Homo Sapiens
gggcgtgagccacggcgcctggccaaatgtrtatgttttaacaaagcatgtacttgagcac

SEQ ID NO: 3391 - DNA, 61 bp, Homo Sapiens
tcatgcctcagtcagcattaaatgcacagtsttttgggctcatgtagaagacaagtaacag

SEQ ID NO: 3392 - DNA, 61 bp, Homo Sapiens
cagtatttctaggtatggcatgtcagcataygaaagttatcaaatatctttaaatattctc

SEQ ID NO: 3393 - DNA, 61 bp, Homo Sapiens
cagagacttttctgatgatttcaagtcctcrtaaacctagcagagaatggaccatgtgtac

SEQ ID NO: 3394 - DNA, 61 bp, Homo Sapiens
cattcttgaatatgaccttctgaattggatwgcttttgtattctagcacattttgttttgt

SEQ ID NO: 3395 - DNA, 61 bp, Homo Sapiens
tggatttggctaaactgccctagattgccamcccttacagtaaaacagtggttctcaaaac

SEQ ID NO: 3396 - DNA, 61 bp, Homo Sapiens
acaaggttcccaaaggccagtttgtgaatcrgaaccagttttcactagtggtaaaatgaga

SEQ ID NO: 3397 - DNA, 61 bp, Homo Sapiens
ggaccctcactcagcaatacttcttgcactrctctggtgcgttctgagtactacctggagc

SEQ ID NO: 3398 - DNA, 61 bp, Homo Sapiens
gtctaaccacttacagaaaatgaaataaagrttgtgtacaaaatggaagaaagagaagccc

SEQ ID NO: 3399 - DNA, 61 bp, Homo Sapiens
ctgacgaagtgttctcctgggagtttccagsacagagagagatttccagttgagatcaggg

SEQ ID NO: 3400 - DNA, 61 bp, Homo Sapiens
atttaaaatgtacaattcagtagctgttagkatattcactgcatcatgcaaccatcaccac

SEQ ID NO: 3401 - DNA, 61 bp, Homo Sapiens
catcttccaacttctcatggtcactgaaacraataaccgataggtggcatcaaggagcact

SEQ ID NO: 3402 - DNA, 61 bp, Homo Sapiens
ggactatacctggccttacttgaaaactaaraactcttagcaacattagcaacatacttct

SEQ ID NO: 3403 - DNA, 61 bp, Homo Sapiens
gcattgattagttggtgttcacaaatactgkccatgggaaaacaatgcagaattccccctg

SEQ ID NO: 3404 - DNA, 61 bp, Homo Sapiens
catatgatggaagccctgccctctaggtacygttagcttagttggagaggtgaaatctggt

SEQ ID NO: 3405 - DNA, 61 bp, Homo Sapiens
aagacatccaagacccaatgctgcaagaggragtgctggttgcagccacaaaggctggcac

SEQ ID NO: 3406 - DNA, 61 bp, Homo Sapiens
acaagaaggaactgagggcacagctgtactkaggaagaactctggtttgcaaggtacataa

SEQ ID NO: 3407 - DNA, 61 bp, Homo Sapiens
ttattctctttccacaaacagactttctatcsacggtggtgatgataaccaataacatttc

SEQ ID NO: 3408 - DNA, 61 bp, Homo Sapiens
tcaaaacttgcagtgagtgactctataaaayggaaaattgaatcaagtctgaaaatgatcc

SEQ ID NO: 3409 - DNA, 61 bp, Homo Sapiens
acatattgccacatatgtacagcctcttttycctgaactgtgtgtatgttgcagacagtat

SEQ ID NO: 3410 - DNA, 61 bp, Homo Sapiens
aaaaatgttacattttgcttttaaaataatsagtctgctttcagtatgtaaaacagcttag

SEQ ID NO: 3411 - DNA, 61 bp, Homo Sapiens
gataaccttaaactctgaccgctagttagcygggcagaacagagccatatttctcttcttt

SEQ ID NO: 3412 - DNA, 61 bp, Homo Sapiens
tttattaaatctgcatgccaaactactttcrgctctccaaatatctatcctctgtcattta

SEQ ID NO: 3413 - DNA, 61 bp, Homo Sapiens
aatcaggagtaaaatgaggattgccattcasacaaaatccagaactggtaggcaatgattc

SEQ ID NO: 3414 - DNA, 61 bp, Homo Sapiens
cactataaccacagactgggtaatttgtaaygagtagaaatgtatttcttagagttctgga

SEQ ID NO: 3415 - DNA, 61 bp, Homo Sapiens
actcaagtataacaaatgggaagtacaaatrcagcatttctgtaactaattaactgtctcc

SEQ ID NO: 3416 - DNA, 61 bp, Homo Sapiens
tgttttctttgttctacttaaggaaacgtcyatttgatggttacaaaaatgtttctcccat

SEQ ID NO: 3417 - DNA, 61 bp, Homo Sapiens
atctggatggactctaagaaggctttgtccrgttgtgtacagtggaaatgatgctgtgcca

SEQ ID NO: 3418 - DNA, 61 bp, Homo Sapiens
acatctagatcctcactggtcaccaaagcasatgtagagagagtacctggagagttgacat

SEQ ID NO: 3419 - DNA, 61 bp, Homo Sapiens
ttccttactgttttcattacttcatttttcrttccgaataaaattatttttacgttgtatc

SEQ ID NO: 3420 - DNA, 61 bp, Homo Sapiens
aggagagtttttcttaaaattactgactgaygacattgagacaagagcatcaatgatcacc

SEQ ID NO: 3421 - DNA, 61 bp, Homo Sapiens
ttggggtaaacaggaatctcagactccagawtactagaacatttcagagacacacacctcg

SEQ ID NO: 3422 - DNA, 61 bp, Homo Sapiens
aaggaaattaaaggaaattttttgcaacaaygtgtacaagaagcacacaacatggtgccag

SEQ ID NO: 3423 - DNA, 61 bp, Homo Sapiens
catcgcacatgaagcagacccaatgagtgastcagcaataaatcaacagtcttaatggaga

SEQ ID NO: 3424 - DNA, 61 bp, Homo Sapiens
ctcctaatgtcacacactcacaaataacttstcatcaggcgaagtcggcctcatcatgggc

SEQ ID NO: 3425 - DNA, 61 bp, Homo Sapiens
cttaactgatctggctattttttctcagctrtggacacagtcccttggcagattctcctgg

SEQ ID NO: 3426 - DNA, 61 bp, Homo Sapiens
agactaatacaacactctactactatcccgrtggccacgtcactcattcccccactagaaa

SEQ ID NO: 3427 - DNA, 61 bp, Homo Sapiens
cctttctcattctatccccaagccctatcaytccttctaattagcatctcttgcattcgct

SEQ ID NO: 3428 - DNA, 61 bp, Homo Sapiens
caaaattaagtgcattcatgaaagaaaaaamctactagcaatcagcaaaaacatatgcata

SEQ ID NO: 3429 - DNA, 61 bp, Homo Sapiens
accaaaacatggtgaattaggttattagaasgttggaacatctctgaagctcaaagccctc

SEQ ID NO: 3430 - DNA, 61 bp, Homo Sapiens
gaaaataactcccagtgaggaagcaggtgayggcctgaccactgtacttccggtatctctg

SEQ ID NO: 3431 - DNA, 61 bp, Homo Sapiens
tgatcagcacaacatcctgtgatgtcagcamtattgttactcttgttttacagatgaggaa

SEQ ID NO: 3432 - DNA, 61 bp, Homo Sapiens
aatatgtctagaatatctctgcaatatgccyccaaatcaactaggagtggccactgcccct

SEQ ID NO: 3433 - DNA, 61 bp, Homo Sapiens
tgattaggcaggttcagtagggtgatatttstaaagagcttggaacatgccaggtgcataa

SEQ ID NO: 3434 - DNA, 61 bp, Homo Sapiens
cccacgtggaattgcatctgcaaagaccatygacagagttctcagctcacagcctggatac

SEQ ID NO: 3435 - DNA, 61 bp, Homo Sapiens
ggtccgaaggtacttaagtgaacaagcaagyggatggagtccatttgccatgactcctgga

SEQ ID NO: 3436 - DNA, 61 bp, Homo Sapiens
gaaatgcggctgacttggatgttgagtttcyagagatttcagttttaaaatcattgtttta

SEQ ID NO: 3437 - DNA, 61 bp, Homo Sapiens
tctttgtcagctgatcccctcttctgctacyagctatttggccagcaagccgtttttagtc

SEQ ID NO: 3438 - DNA, 61 bp, Homo Sapiens
ccaagaatgatttaatttgagaattcagacrttgagtaataaacatgtggtactaattaac

SEQ ID NO: 3439 - DNA, 61 bp, Homo Sapiens
aaactaaaacaaggtcttcaccaagattgtyaaatgatgtttctcaggtcctctcagcaga

SEQ ID NO: 3440 - DNA, 61 bp, Homo Sapiens
ctggaaaatgcttcctgtggctttcttgatyccacactctgggcttcctcttccctctctg

SEQ ID NO: 3441 - DNA, 61 bp, Homo Sapiens
aagatctgcttttggagagaaactaagctargacagtctccttaacatgagaagtgctcag

SEQ ID NO: 3442 - DNA, 61 bp, Homo Sapiens
tttacagataattcacaaggcacgaaaatgytcaatcaaatgtggaaattttaaagctgat

SEQ ID NO: 3443 - DNA, 61 bp, Homo Sapiens
ggaacaaaatatggctgggactatactggargggtacgccagagatacaagtagaaagtaa

SEQ ID NO: 3444 - DNA, 61 bp, Homo Sapiens
ttagcctataatttgaagagcattatcataytgatccaatttcttaccctataaaagaatc

SEQ ID NO: 3445 - DNA, 61 bp, Homo Sapiens
tgcaacagtaataggtagatttcatttatgrtctctgttggatggatgacagaaacctatt

SEQ ID NO: 3446 - DNA, 61 bp, Homo Sapiens
aaatgttcctagggatatagataattcacaraatgaaagagtctaatcacatacataagag

SEQ ID NO: 3447 - DNA, 61 bp, Homo Sapiens
ttcggtctctgcacccgtctgcctcgtctarggtttcttttcatgacaaattcgagttcga

SEQ ID NO: 3448 - DNA, 61 bp, Homo Sapiens
caaaaagtcttttaaaaaaaaaggagtttcyctcaaacagcagttaacttagtaaatacaa

SEQ ID NO: 3449 - DNA, 61 bp, Homo Sapiens
gtagtcgctgtcatcatagtagtagcagtayatgactgtattaatgacccttccccttccc

SEQ ID NO: 3450 - DNA, 61 bp, Homo Sapiens
gtgcagggggtaacctgttcagatcaagccrgtcagaaggctccacaagggacttttctca

SEQ ID NO: 3451 - DNA, 61 bp, Homo Sapiens
tgggggcaaatacatgcttcaaaatgttaaygcacttttcacattttctatcaaaaaaaaa

SEQ ID NO: 3452 - DNA, 61 bp, Homo Sapiens
attgatagggcaatggtggaagcaaaaggcrtcataacagcatgaggcagtgactcaaggt

SEQ ID NO: 3453 - DNA, 61 bp, Homo Sapiens
gtggcatggagagttaacccaagtcataggyagaaagggccctgccatttaccctcctcag

SEQ ID NO: 3454 - DNA, 61 bp, Homo Sapiens
tcattctggctcacctcagatcgtttccagsctgaggatgctttacgttacccaacatgcc

SEQ ID NO: 3455 - DNA, 61 bp, Homo Sapiens
gaatcactgtatcactggaagaagctagaartggagtaatcaatatcaacaaaatctattg

SEQ ID NO: 3456 - DNA, 61 bp, Homo Sapiens
tttctattaaaaaaaaatggttctgtttccscaacaggacccctgctgatacaatcaccgt

SEQ ID NO: 3457 - DNA, 61 bp, Homo Sapiens
gtccttgcacgttttgacaaggggagagacmtgacctgagttttgctttagcaaggttaat

SEQ ID NO: 3458 - DNA, 61 bp, Homo Sapiens
agtcttttcaaagttgcaggagatgcagttktctaggcttggtgctgaaaatatagataag

SEQ ID NO: 3459 - DNA, 61 bp, Homo Sapiens
tgtatttactgtagccacaagaacctgattytccataagtcacagtggttcattgagggag

SEQ ID NO: 3460 - DNA, 61 bp, Homo Sapiens
tgacattgataaaatccaccaatcttgttcrgatttcccagttttacttgtactcatctat

SEQ ID NO: 3461 - DNA, 61 bp, Homo Sapiens
ccctgtttggggaatggttcaagcccagatrgagtttcttgtatttgtcattaatagacaa

SEQ ID NO: 3462 - DNA, 61 bp, Homo Sapiens
caaaccaatgtgtaggcagttttctttgctkagacatgaagcagttttaacactggccctt

SEQ ID NO: 3463 - DNA, 61 bp, Homo Sapiens
ttgtgggacagcatggatgacaaatggtctrctatgtaacttttagaatgaggcagacaaa

SEQ ID NO: 3464 - DNA, 61 bp, Homo Sapiens
gaaatgaaatcatgtatatcaagtacccagyctatggtctagtttatagtagcagtatttc

SEQ ID NO: 3465 - DNA, 61 bp, Homo Sapiens
gactgacaggaatattaaagaagagagtggwtacaaagcgcccatcatactttatagcaag

SEQ ID NO: 3466 - DNA, 61 bp, Homo Sapiens
ggggtagggacatgcctgctgggtgtttacmaaaagtcccttgatctgtgcccctctagac

SEQ ID NO: 3467 - DNA, 61 bp, Homo Sapiens
atatatgttgaagaaatatgtaatgcctcayttaaggaaacaatcttctagagttaaagtg

SEQ ID NO: 3468 - DNA, 61 bp, Homo Sapiens
gttttgggtccctggtgaagcaggtcagggrcgtgagaaaagaggaaataatgggtttcca

SEQ ID NO: 3469 - DNA, 61 bp, Homo Sapiens
tcaacactagagggtagataactttattctyaagcatgacaccccaggtacttcctcacct

SEQ ID NO: 3470 - DNA, 61 bp, Homo Sapiens
gcgaccttagaagaagaagagatttggaaayagagacatgcatagaaagaagaggatgtga

SEQ ID NO: 3471 - DNA, 61 bp, Homo Sapiens
tccttgatggaaccaaacccagatcttctcyggcaatggagatgccacacataaagaagaa

SEQ ID NO: 3472 - DNA, 61 bp, Homo Sapiens
ctgcagccacagctctttgctctccagcacygactttctcaccattgctggcaacgtgcac

SEQ ID NO: 3473 - DNA, 61 bp, Homo Sapiens
ggtatctaccaggatgtattgcagtcctctstcaaaaatattacaaacattttcacataca

SEQ ID NO: 3474 - DNA, 61 bp, Homo Sapiens
aggaggaagataaacaccattctctgctttyagtattataaaaccgtcccacaattccaac

SEQ ID NO: 3475 - DNA, 61 bp, Homo Sapiens
tgatgcttgaaagggctgccaatcacagtarccagttcctctggctttggccataataaat

SEQ ID NO: 3476 - DNA, 61 bp, Homo Sapiens
tgctctagctacatacatctctttatcacgyaggcaaaagtgttcccagaaactctgctaa

SEQ ID NO: 3477 - DNA, 61 bp, Homo Sapiens
ctgtacctctctcttgagccccatgaccccrttgaagtaatctgatattgtgaaatatata

SEQ ID NO: 3478 - DNA, 61 bp, Homo Sapiens
gttaaatggggagatgccatgagacccaacygctacccagagaggtacaagccctgaggat

SEQ ID NO: 3479 - DNA, 61 bp, Homo Sapiens
cactagagatccagaatcctggtttcactgrcctgggaggcatctgggaacagctctccca

SEQ ID NO: 3480 - DNA, 61 bp, Homo Sapiens
tgatgaagaggacaagagatgaggatgcagrtgctttccgttggagggaggggatgcgtac

SEQ ID NO: 3481 - DNA, 61 bp, Homo Sapiens
cttctatttctgttctgtgcagaataaactrctctctaaaggcctgtctcatactcatcct

SEQ ID NO: 3482 - DNA, 61 bp, Homo Sapiens
agaactggttttgaattccagtcctgaaacstactagctgggtgatcttggacaatttact

SEQ ID NO: 3483 - DNA, 61 bp, Homo Sapiens
aagaaaagggaaaggtcgcagaaatgtagaygtaaagacagaggtagctgcatatttctga

SEQ ID NO: 3484 - DNA, 61 bp, Homo Sapiens
attttcttaataaaatctgcacacacatctycagaaggctttagagctgttgggtagattc

SEQ ID NO: 3485 - DNA, 61 bp, Homo Sapiens
aagtgccatcagttttggtgcatgctgtatyctcagaaggaatgaatgaataaatgaaagg

SEQ ID NO: 3486 - DNA, 61 bp, Homo Sapiens
ttcatagcttagtgattagtgtgcagttacrtagcttgggcccagactacagctttgccac

SEQ ID NO: 3487 - DNA, 61 bp, Homo Sapiens
tttgcagtagatgaataaaagaaaatgtacmtgcagcacaggagtcaaaaacaacaataat

SEQ ID NO: 3488 - DNA, 61 bp, Homo Sapiens
aaataaaaataatctataattccattaagcrgatataacccacattaaaatatcaatgtat

SEQ ID NO: 3489 - DNA, 61 bp, Homo Sapiens
tttgaccagttttctgctctgctcaactcckttcaatcttcccagatgacaggccagcttt

SEQ ID NO: 3490 - DNA, 61 bp, Homo Sapiens
aagaaagttcccctacctccagggcatgttyagggaatctggcgctgtccaccaggtgggt

SEQ ID NO: 3491 - DNA, 61 bp, Homo Sapiens
ctttcctcgctcctctcccacccacagaccrattttaaccagagagtaagtcattcatgct

SEQ ID NO: 3492 - DNA, 61 bp, Homo Sapiens
agtcggaggccttggctgaggtgcccagttycttggttcactttctttacctgccaggtta

SEQ ID NO: 3493 - DNA, 61 bp, Homo Sapiens
attaacatatctgtcatttcaaacattgcarttcttgacaactcttactgtatgtcctgga

SEQ ID NO: 3494 - DNA, 61 bp, Homo Sapiens
gatttaatgcccatatcttaccagttcagtwatctccagagccatttcaccctttagagtg

SEQ ID NO: 3495 - DNA, 61 bp, Homo Sapiens
gagcaaaaagtatttatcttgggcttatctraatgatcaggatgagatttaatgcccatat

SEQ ID NO: 3496 - DNA, 61 bp, Homo Sapiens
ctgtcctagagtgatttgaaaaggggatttrtgagaacccagctcccctaactgcgattga

SEQ ID NO: 3497 - DNA, 61 bp, Homo Sapiens
cttatggtaggtaggttgcagatttgagatygagtcttaaaaagaacaagaaagaaaaggg

SEQ ID NO: 3498 - DNA, 61 bp, Homo Sapiens
gtaaaatggcagtaatagtagcctcctcaarggaagggtgtgagggctgcaatgcataatg

SEQ ID NO: 3499 - DNA, 61 bp, Homo Sapiens
caggctggggtaagttcatgttgccacggaytctaggagggatctctgaagtgtcaagtac

SEQ ID NO: 3500 - DNA, 61 bp, Homo Sapiens
taagcgagggtggaggagagttggagagtcyttctcttctatgtataatcttctcaatgca

SEQ ID NO: 3501 - DNA, 61 bp, Homo Sapiens
catgggaaactgcatcccttgaggagactcrtctggacttctctctgccgggaggcactgg

SEQ ID NO: 3502 - DNA, 61 bp, Homo Sapiens
gtctggacttctctctgccgggaggcactgrcgttgtaagaaatgaaggaatggggtcagg

SEQ ID NO: 3503 - DNA, 61 bp, Homo Sapiens
gttcagagacatgcaaatcaaaactacaacraggcaccacctaacagcagtcagaatggct

SEQ ID NO: 3504 - DNA, 61 bp, Homo Sapiens
gaagcagccaacactagaaatataaacgaakgaatcatctatacagaggtagtaattaaag

SEQ ID NO: 3505 - DNA, 61 bp, Homo Sapiens
agaatcaagtcagaacaggagagggtttacractgaaccttgagcaagttcaaatttaaag

SEQ ID NO: 3506 - DNA, 61 bp, Homo Sapiens
tgacaaataatgttatgatgaatatcctgawacttgcctattgagcaaatttccaagtttt

SEQ ID NO: 3507 - DNA, 61 bp, Homo Sapiens
ccagtggcctctttacttctccttcaaagawtacccctgtacaagtcccaggttgccccaa

SEQ ID NO: 3508 - DNA, 61 bp, Homo Sapiens
caggcagacattatatgggtatgctttcagyttctttgcatagcattgtgctatttttttt

SEQ ID NO: 3509 - DNA, 61 bp, Homo Sapiens
tttactgttggtatgtggcagtgaaaaatayatcagcgactaacatggtttggggtcatta

SEQ ID NO: 3510 - DNA, 61 bp, Homo Sapiens
ctcgttattcccatttattgtacctctatgytttttcctaatagttttacctaatattcct

SEQ ID NO: 3511 - DNA, 61 bp, Homo Sapiens
taggaaaaagttctttggtatgttcctaatyagcatggctgtgattggcttgtattaccac

SEQ ID NO: 3512 - DNA, 61 bp, Homo Sapiens
ggctgttttcttaacttttaaatcacaattstcttgatgggtttttgctttcatttgggat

SEQ ID NO: 3513 - DNA, 61 bp, Homo Sapiens
tgggcacaattggttttaaagatgcttacarccccgttatcacctcataaaatggctcatt

SEQ ID NO: 3514 - DNA, 61 bp, Homo Sapiens
gaatcactagcctacagaggaagtcaaaagmgccacctgtgaaaaacactcgactctcctg

SEQ ID NO: 3515 - DNA, 61 bp, Homo Sapiens
ggcagctcacagacaaacagcttatacatgrctaataaacaagaaaagacgggctgggcgc

SEQ ID NO: 3516 - DNA, 61 bp, Homo Sapiens
gtttaatttcttagcaacagggaatgcattrattttcctactagtattgtcaaatgttttt

SEQ ID NO: 3517 - DNA, 61 bp, Homo Sapiens
aatggggatatcaatggacagattaatgctyctcgtactatgacaagtaagctcttgataa

SEQ ID NO: 3518 - DNA, 61 bp, Homo Sapiens
aagttttgtgtgttataacaaaaggagtccrttatcaaatccgtttggggaattccataag

SEQ ID NO: 3519 - DNA, 61 bp, Homo Sapiens
taagaatgctatcagatatatccaccaaagwttagcctagaaaagcacgatgattcaaaga

SEQ ID NO: 3520 - DNA, 61 bp, Homo Sapiens
gtgtcattatatcacaatgtaaataaatagyaagtggaagttgctgctatgggagtgctgt

SEQ ID NO: 3521 - DNA, 61 bp, Homo Sapiens
actgaggacccacctcacaggaagaaaaccrtctgactcataaagggatccgaccaaggct

SEQ ID NO: 3522 - DNA, 61 bp, Homo Sapiens
tcagagccacaaaccggagggaagtggagarccggagctcaggcctcgagtctagtgaggc

SEQ ID NO: 3523 - DNA, 61 bp, Homo Sapiens
ctaatggtgtgctatgttttaatcactatgwtaaacctggatacattgtataaccaatgca

SEQ ID NO: 3524 - DNA, 61 bp, Homo Sapiens
gcatactacctggtatatagtgaaccttaartaaatgccaacttcccttccatcacatcac

SEQ ID NO: 3525 - DNA, 61 bp, Homo Sapiens
tctatgggcaccagtctggttgtaaattgasgaatcagattacatgatgtctttggctcct

SEQ ID NO: 3526 - DNA, 61 bp, Homo Sapiens
agggcaaagagaagggaaaacctagaaaacygagtcaagagtcctgttggatacagtttca

SEQ ID NO: 3527 - DNA, 61 bp, Homo Sapiens
gtagatgcttaatgagactttgttgaatgaktaaataaataaactctcaagggggctacta

SEQ ID NO: 3528 - DNA, 61 bp, Homo Sapiens
gggaaatgaaggcagcttctgcaagaccccrggaaggtacattctctctgacaccaccagg

SEQ ID NO: 3529 - DNA, 61 bp, Homo Sapiens
ggaatattttcttttcacactgatggtaagyaaatgtccaagggtttggtccacatatgcc

SEQ ID NO: 3530 - DNA, 61 bp, Homo Sapiens
cttccaggattctgcacatctcattagcttyatattcccgtaagtacttgggtttctgctt

SEQ ID NO: 3531 - DNA, 61 bp, Homo Sapiens
gtccctttcattccctctccaacagatcttwaacaacaccatactctcattccagccccat

SEQ ID NO: 3532 - DNA, 61 bp, Homo Sapiens
agctgaaaatctactccacgatgaaagatcrgaatgtggcacaagttcttttcaccgaata

SEQ ID NO: 3533 - DNA, 61 bp, Homo Sapiens
aagttgactctaaaataacaaatacttgacmtctaattatccaaagaatacatttaggaaa

SEQ ID NO: 3534 - DNA, 61 bp, Homo Sapiens
gcaaaggccaaaatgtcactgataagctgtktaaagggacaatcacatgggatagggtgta

SEQ ID NO: 3535 - DNA, 61 bp, Homo Sapiens
aacagtactaccaccattctcctctcaaacyactgaatcaagaacctccattcatttctta

SEQ ID NO: 3536 - DNA, 61 bp, Homo Sapiens
aggacagaagggattaattggccagagcgcragatgaataaaactgagaggggtcctagga

SEQ ID NO: 3537 - DNA, 61 bp, Homo Sapiens
ccatgctcttttctactttggggcttttgcrcctgttggtatttctgcatgaagtgttctc

SEQ ID NO: 3538 - DNA, 61 bp, Homo Sapiens
aaggatagtctatcggtagcccgtattcaargagtcacatctaaattttgcactaaatcaa

SEQ ID NO: 3539 - DNA, 61 bp, Homo Sapiens
ctttggacatatgccatctagtctgtaaatrtgtcatggttcagtagatgacttcttagtc

SEQ ID NO: 3540 - DNA, 61 bp, Homo Sapiens
gtctagctctgttacccaggctgaaattcartagtatgatcacagctcagcgcagttttca

SEQ ID NO: 3541 - DNA, 61 bp, Homo Sapiens
attttactgtgaagagggttggaatgtctcyaagttgcccaagatcacatatctagtttat

SEQ ID NO: 3542 - DNA, 61 bp, Homo Sapiens
tggctgaaccactggaaggtagaagatggcygagtccagggaaatattcaaaaactcaaat

SEQ ID NO: 3543 - DNA, 61 bp, Homo Sapiens
tagattcactaagttgaaaagctcgtaaagrttacttttctacaaaatacacaagcaatta

SEQ ID NO: 3544 - DNA, 61 bp, Homo Sapiens
tataaagacatgtaaacttccccacactccmagatactatccggggtggattagatgggaa

SEQ ID NO: 3545 - DNA, 61 bp, Homo Sapiens
cacttactagctattttcatcctgggtaaarcacttatcctatcacggccttagttttctc

SEQ ID NO: 3546 - DNA, 61 bp, Homo Sapiens
tcttcttttattaccctgtaaatgctgtttygttaccctttctcatacaggatctaatcca

SEQ ID NO: 3547 - DNA, 61 bp, Homo Sapiens
agtataatcttaaaaagagatattagttccrtcctgcttctctcccaccaactctgcttgc

SEQ ID NO: 3548 - DNA, 61 bp, Homo Sapiens
ctgaccaatgaaatagctgtacgtatttaawgtagatccttttatcacaatttaaagctga

SEQ ID NO: 3549 - DNA, 61 bp, Homo Sapiens
tcgcaatgcctgcatcactcacctcacttcwtcttatcatacaggcattttgtcatctcat

SEQ ID NO: 3550 - DNA, 61 bp, Homo Sapiens
ttgtttgagtaaatatgaagttctaaggcarggaattctttgaagagtaagtagccacatt

SEQ ID NO: 3551 - DNA, 61 bp, Homo Sapiens
tactgggatagagatggaaggctgactactyaagttacatgctcagagatgctaagaccaa

SEQ ID NO: 3552 - DNA, 61 bp, Homo Sapiens
aatctaagacgtaaagtaactcactgcctcyaatgtgcccctccattagcatgaccttttt

SEQ ID NO: 3553 - DNA, 61 bp, Homo Sapiens
atttactgtctttctatcctctagcaaagcrttttgtttccaagtctattcattgcagaat

SEQ ID NO: 3554 - DNA, 61 bp, Homo Sapiens
tattcattcattcatttattcaaagagtatrttatgcctactctgtgtacagcacaatatc

SEQ ID NO: 3555 - DNA, 61 bp, Homo Sapiens
aacagtactatattaatgttaaccatgatgktggggacaatgtttgaattagcacgagaaa

SEQ ID NO: 3556 - DNA, 61 bp, Homo Sapiens
aaccaattagaaaagaactatagtctaaggwgccacatagagttgagaacctgcttacatt

SEQ ID NO: 3557 - DNA, 61 bp, Homo Sapiens
gaacactgtaatttatataagtgagtggagytttatgattataatatgcaccttggaagcc

SEQ ID NO: 3558 - DNA, 61 bp, Homo Sapiens
tctaggttcttcttgctgctataaactggaygtgacatttgccttcttggaccataaatac

SEQ ID NO: 3559 - DNA, 61 bp, Homo Sapiens
gaaatgcaaatcttgggtgctggtgcgggargatgttgtagatctgggattctcaaacttt

SEQ ID NO: 3560 - DNA, 61 bp, Homo Sapiens
acgaggttgctgccacttctcacatgcaccwcaacactgctgttttacaaaaacttcagat

SEQ ID NO: 3561 - DNA, 61 bp, Homo Sapiens
ggccaaccaaagtgacttacagtgtttcaamtggatatggctgtgtctagtccctgtgagt

SEQ ID NO: 3562 - DNA, 61 bp, Homo Sapiens
gcatcagccggttatgttttctgagaaatcstggctaagagatgagccttcatctaaacac

SEQ ID NO: 3563 - DNA, 61 bp, Homo Sapiens
tccacattcagcatgctttccccacaccagrcttactgaatatccctccaaggacgctgct

SEQ ID NO: 3564 - DNA, 61 bp, Homo Sapiens
tatatatatatatacacatgcagtgactatstacgtcaaatgaaatactcccccgtgcccc

SEQ ID NO: 3565 - DNA, 61 bp, Homo Sapiens
ccagacagatgaggatcaactgtagcatttytctccctctgaaacgtggctgggataggta

SEQ ID NO: 3566 - DNA, 61 bp, Homo Sapiens
gctcccaacttccagatttgttacctttgcygcattggagttaatgaaaagtgtgataaac

SEQ ID NO: 3567 - DNA, 61 bp, Homo Sapiens
agaaatgcccttccatggcctcatgccagaygttgaatggttgaatgtttataactctaaa

SEQ ID NO: 3568 - DNA, 61 bp, Homo Sapiens
tctgctttctaaagatggagtgagaagaatwggaaatactgggctgtagtaataagcaaat

SEQ ID NO: 3569 - DNA, 61 bp, Homo Sapiens
tgtgatgttgtaaatgtagatccttcttccyactgagtttctcccataaatgctaaagcat

SEQ ID NO: 3570 - DNA, 61 bp, Homo Sapiens
ctatgttgtcctggaaaagacactaatattckcccagcctaagtttcctcaaaggtaagtg

SEQ ID NO: 3571 - DNA, 61 bp, Homo Sapiens
catgaaagaacctggaaagcttctattgttygtaaagtgtctacctgtcatattccctcac

SEQ ID NO: 3572 - DNA, 61 bp, Homo Sapiens
cacagaaaataaatatattgatattgaaaarcagaaagaaaagtcaaccatttgagttgct

SEQ ID NO: 3573 - DNA, 61 bp, Homo Sapiens
tatatctatatctgtattcagcactaaggcragtacacacctgtttgttcaaatgctgtca

SEQ ID NO: 3574 - DNA, 61 bp, Homo Sapiens
gtgaggccacagcaatggagtttcaagaagwagccgcagcttacattgttactctcccagg

SEQ ID NO: 3575 - DNA, 61 bp, Homo Sapiens
aaatgagcttcaataaatgaagaggcatacyacattctgggaaaggaagagtgaatgatat

SEQ ID NO: 3576 - DNA, 61 bp, Homo Sapiens
gtcaacgatttaatacatcaggcctatgtartgaaaccttcatgaaagcccctaagtatta

SEQ ID NO: 3577 - DNA, 61 bp, Homo Sapiens
gtttgggttaaatgacaagaagtcaattttstgtaaaggggctgttgacatgagcttatgc

SEQ ID NO: 3578 - DNA, 61 bp, Homo Sapiens
ggctaaacataatcccagaccaattttctcwtctgtgagtagaagtaataatggcacctgc

SEQ ID NO: 3579 - DNA, 61 bp, Homo Sapiens
gtttccacaccttgcaactaagttctatcaycacttttcatctggagaatgtggtaaaatt

SEQ ID NO: 3580 - DNA, 61 bp, Homo Sapiens
gactgtctcttagcaatgtgtctgtgatttkcatgatctaaaagggggtcaaaaatatctg

SEQ ID NO: 3581 - DNA, 61 bp, Homo Sapiens
atctggacctaaattacttgctttgtgtatraagtctcacttctgtgtcatgctggaatta

SEQ ID NO: 3582 - DNA, 61 bp, Homo Sapiens
ccatccctgtgggagtcatttaaaacaggakagaaaggcacactggagaatatgccataag

SEQ ID NO: 3583 - DNA, 61 bp, Homo Sapiens
cgttttctgctttactcccttccaaagctgrcaaggaaggcctgaaattctacctttgctg

SEQ ID NO: 3584 - DNA, 61 bp, Homo Sapiens
gggaaacaaatacatgcatcagtgtatatgytaatgatccctggcctcccctcctgtcggg

SEQ ID NO: 3585 - DNA, 61 bp, Homo Sapiens
actctgagattgtcttgaaaatcctctcacrcttcctatgacaactctcaatcaaccttct

SEQ ID NO: 3586 - DNA, 61 bp, Homo Sapiens
attttcagaactacaggccacctcactatcyctgctcaagctgggtctttttctgaggctc

SEQ ID NO: 3587 - DNA, 61 bp, Homo Sapiens
tctagggatgcattcatcagcccatgtgtasagaaatcagtcaggcccctttctaaaacat

SEQ ID NO: 3588 - DNA, 61 bp, Homo Sapiens
ctctcatcacaacccaaatggcaaagtccaygttctctggcagggctcagctggggaaaga

SEQ ID NO: 3589 - DNA, 61 bp, Homo Sapiens
cgagtgcttcatctataaaatgaaagcactsaactagacaatttccaaggtcccttttgat

SEQ ID NO: 3590 - DNA, 61 bp, Homo Sapiens
caacacctgcacagcacaagaaagctgagcmtagtaaaacgaggagctttgcctgtgttct

SEQ ID NO: 3591 - DNA, 61 bp, Homo Sapiens
gatttggtttaaactctcttcttcgtgcccrtgcctgaggcagtgaggagtaagcctccat

SEQ ID NO: 3592 - DNA, 61 bp, Homo Sapiens
ccacctattctccttataccagggctacctsttggccacagaacagagtgtccctctggcc

SEQ ID NO: 3593 - DNA, 61 bp, Homo Sapiens
ctcctgaggaaacccagatagctaggacagrgacataaaggagctgactaatcagggagtg

SEQ ID NO: 3594 - DNA, 61 bp, Homo Sapiens
gctacgaggtccctcacctgtttttcctcaratggcaagcccaggaagggggcagaggcca

SEQ ID NO: 3595 - DNA, 61 bp, Homo Sapiens
cctccagcaatctgatgactcaaaaccctgstgagctgcaggctccctcccatggctgcag

SEQ ID NO: 3596 - DNA, 61 bp, Homo Sapiens
ctgacagatgcaaagtttgggttgttgtgayagttaccagtgtgggttcaagtcttcactc

SEQ ID NO: 3597 - DNA, 61 bp, Homo Sapiens
aaaatgtgtctaaagtttctctcttgggaawgtttattgtagaattttggtattactctta

SEQ ID NO: 3598 - DNA, 61 bp, Homo Sapiens
atacatttttcggtcaatcatttaccaaccrggacacatttcttcttggagctaaagccat

SEQ ID NO: 3599 - DNA, 61 bp, Homo Sapiens
gtcacttcccaaaaacgtagttcacccaacrtccatagaaattcctggagtctgctttgga

SEQ ID NO: 3600 - DNA, 61 bp, Homo Sapiens
ttcatgttctttgcatcttgacacaaaaatrtatctttgctcctctttgaagctttctgtt

SEQ ID NO: 3601 - DNA, 61 bp, Homo Sapiens
cgagagaaaatgctaaaggagagcaaccagkctgctgtccagaaattggaaacaaacacga

SEQ ID NO: 3602 - DNA, 61 bp, Homo Sapiens
ctcttttttggaaacattctacggcattagmggagtaggcactctaccctacccacctccc

SEQ ID NO: 3603 - DNA, 61 bp, Homo Sapiens
ggtattttaaatagagtagtcggagaaggtsttcctgatgtaatatttgaggaaaacaggg

SEQ ID NO: 3604 - DNA, 61 bp, Homo Sapiens
cacagctcatatagaacttgaatctcccaarctcacttcattgagtttgcctttttacttg

SEQ ID NO: 3605 - DNA, 61 bp, Homo Sapiens
aagtctgagtgttcgccctgtgaggtgatgractgatctgggtcccaaaaaatggtcaccc

SEQ ID NO: 3606 - DNA, 61 bp, Homo Sapiens
agacatttgataaaatgctgaattgtctttraaatatgaacatggacaatatcaatacatg

SEQ ID NO: 3607 - DNA, 61 bp, Homo Sapiens
gagtggccagggaagccttgggccaggtgcrccccgcgtttccggtagtggtaggcaagta

SEQ ID NO: 3608 - DNA, 61 bp, Homo Sapiens
gatatagccataggaaaaatactacatacarttcagttgctccctggtgatcaaatatgga

SEQ ID NO: 3609 - DNA, 61 bp, Homo Sapiens
ccccaaaatagtgtgtacctgtatgcaaatrtgcaagcgtgtttatttaaggggtggatga

SEQ ID NO: 3610 - DNA, 61 bp, Homo Sapiens
aaaacttataaatgtacattatctgtttttytcaaggaggggcaaggcttctttttataag

SEQ ID NO: 3611 - DNA, 61 bp, Homo Sapiens
ttggaggatgtggcccagggggacctgctcrgctttctctggacctgtcggcgggtgagca

SEQ ID NO: 3612 - DNA, 61 bp, Homo Sapiens
tgcaaaagcattaagcagggagcatagctgsaatagttgagaaatagccaggaagccagtg

SEQ ID NO: 3613 - DNA, 61 bp, Homo Sapiens
tcctcccttcattcatttctccctcatttgyatgtaatcttcagcaagttagatcacttcc

SEQ ID NO: 3614 - DNA, 61 bp, Homo Sapiens
tgaacaggggcttggtaaaacaaggttgagrtctactaggttgcattcccaggaggttagg

SEQ ID NO: 3615 - DNA, 61 bp, Homo Sapiens
ccattaattagactgtccctaagtatgaaayatgggtgaggaaaagagacagagagtgaaa

SEQ ID NO: 3616 - DNA, 61 bp, Homo Sapiens
gatttgctctgaccatgtcaattgttaagamttagctgtcagctgacctccgtggctgact

SEQ ID NO: 3617 - DNA, 61 bp, Homo Sapiens
ctttatgcagctggggatttgagataatgtyccagtaaccctcacaagattggtttggttc

SEQ ID NO: 3618 - DNA, 61 bp, Homo Sapiens
tgagaagatctatatgccaagaaggtggtgrggagtaagtgcagttgtttgtgtgtgtata

SEQ ID NO: 3619 - DNA, 61 bp, Homo Sapiens
cattttcctcttacatatgatggggctacaraaatctacctccaaagaattgttgtgaaga

SEQ ID NO: 3620 - DNA, 61 bp, Homo Sapiens
tgcctcgaggtagtagctggttagtgcttgyaaagatgccacatcacagcatatgaggaat

SEQ ID NO: 3621 - DNA, 61 bp, Homo Sapiens
aagtttctgtggggataactgcctgccgacrtatatggaaagcgctcgttggggagaaaat

SEQ ID NO: 3622 - DNA, 61 bp, Homo Sapiens
tcacttcatagccatcattcaaggtgggcartattaaaagatcagaaaaatactgcgttga

SEQ ID NO: 3623 - DNA, 61 bp, Homo Sapiens
tatttcaaagacagggtctttgtccttttawgactactcacttagcctaatatcctcaacg

SEQ ID NO: 3624 - DNA, 61 bp, Homo Sapiens
gagataattggggtttctcatcagttgactkgagttgatcagagcccagattatactgggt

SEQ ID NO: 3625 - DNA, 61 bp, Homo Sapiens
acttcatgtaaaatctcttcctagacatacmtattcagtactataatttttggtttctaac

SEQ ID NO: 3626 - DNA, 61 bp, Homo Sapiens
cagaagacctttcttatatataacctctgawatttagtgacagttggaatttgatggcagc

SEQ ID NO: 3627 - DNA, 61 bp, Homo Sapiens
aaaatatttattgggtccctaacatgtgctrggctattttatacttggtggtggtggggag

SEQ ID NO: 3628 - DNA, 61 bp, Homo Sapiens
ttctactctgctgtagtttgagtcctttagyggtctcctttgcactgctgcctcaggcact

SEQ ID NO: 3629 - DNA, 61 bp, Homo Sapiens
aaaaattagaaattgacttggaccaatagartgtatgcctaatcaaatccataatgctata

SEQ ID NO: 3630 - DNA, 61 bp, Homo Sapiens
acctacatttaccttcaacgttttcaatctmatattaaggtggaactacttgtgatagtta

SEQ ID NO: 3631 - DNA, 61 bp, Homo Sapiens
tataagttcaaatggcatgatcactaactgstttctcaccctagactgccacttgtactag

SEQ ID NO: 3632 - DNA, 61 bp, Homo Sapiens
ctttagatagatacctggtagtggaattctkgggtcatatggtagttctattttaagtttt

SEQ ID NO: 3633 - DNA, 61 bp, Homo Sapiens
tcccagattttaatatgccagtgttcattaytgatgtctaagaggaaagtctcctaagtcc

SEQ ID NO: 3634 - DNA, 61 bp, Homo Sapiens
gctttgaaaaacaagatcttccttgccagtrcacgagagggaaagaaaaaaagaaaagaaa

SEQ ID NO: 3635 - DNA, 61 bp, Homo Sapiens
tatattgagattaatacatgaaaatgcttaraagtgataggaattattgagaaacttatga

SEQ ID NO: 3636 - DNA, 61 bp, Homo Sapiens
gaaaataactgaaaagattaaaagtgagagytgaaaagagaaatgataatgcttccaaact

SEQ ID NO: 3637 - DNA, 61 bp, Homo Sapiens
acccaagtgtgaaccaaatatttgagcacamgaaactcctagtagtccaggtgttcagact

SEQ ID NO: 3638 - DNA, 61 bp, Homo Sapiens
gatgtttgccaaatggtgacatttatttccrtcattctgtctacattttattaattggaat

SEQ ID NO: 3639 - DNA, 61 bp, Homo Sapiens
cttgaaggaattttcatccatctttaatctyacccacctctaaatcacttcacagtggccc

SEQ ID NO: 3640 - DNA, 61 bp, Homo Sapiens
ccaggtttgcaacacaactacagacaggaarcatgcagacatctttttggaaaagtgtgtt

SEQ ID NO: 3641 - DNA, 61 bp, Homo Sapiens
tagagcccaaatagccaaagcaatcctgagyaaaacacaacaaagctggaggtatcacgtc

SEQ ID NO: 3642 - DNA, 61 bp, Homo Sapiens
ctctaccaaatctaactaagcctttagctgrttataggcacataccaccatgcccagctaa

SEQ ID NO: 3643 - DNA, 61 bp, Homo Sapiens
ttctaggatggtagagagtagtcttcagccygagagccatccctagggaagtagctgaatt

SEQ ID NO: 3644 - DNA, 61 bp, Homo Sapiens
gccaataggtgtatgaaacaatgttcaataycaccagtcatcagggaaatgcaaatcaaaa

SEQ ID NO: 3645 - DNA, 61 bp, Homo Sapiens
aatttttcacagcttcagcttctagaaagtyagtgtcattttgtttcaacttgaactccct

SEQ ID NO: 3646 - DNA, 61 bp, Homo Sapiens
cagtagctgaagtttatttgcagagatagaytggcatattagttcagataaaacaatttat

SEQ ID NO: 3647 - DNA, 61 bp, Homo Sapiens
gtttttgttttaacacaagttctagatgtgycctacatatgtaatgctataatgtctacat

SEQ ID NO: 3648 - DNA, 61 bp, Homo Sapiens
aaatgtgagatctactatctattgtatgttmttgatggttagaaaggttagaggtggaaga

SEQ ID NO: 3649 - DNA, 61 bp, Homo Sapiens
gactccagagattatccaagtaggttacagrtaaagaattcacactaggcattaagtgact

SEQ ID NO: 3650 - DNA, 61 bp, Homo Sapiens
gaggcactatcattgtcaccatttgtgtgtraccgaagcttcaagcattctagatataacc

SEQ ID NO: 3651 - DNA, 61 bp, Homo Sapiens
ccactgtagagctctttcgctccaattaccraagtgttccagaaccttttcttattaccaa

SEQ ID NO: 3652 - DNA, 61 bp, Homo Sapiens
tttatctgtttataagtaccaatacatccarttccagtaatgtgccacatatttgccaact

SEQ ID NO: 3653 - DNA, 61 bp, Homo Sapiens
caatgcatatttcatacctgcatttagtacsttgtgtttatttagtctgcctagtagagaa

SEQ ID NO: 3654 - DNA, 61 bp, Homo Sapiens
aaatacagtattataatctcatgagaccacmgtcataaatgcagttcatcattgactgaaa

SEQ ID NO: 3655 - DNA, 61 bp, Homo Sapiens
aaggagataaatttgaagatgaaaacaacaytttgtggaattttttcgtcctccaattttc

SEQ ID NO: 3656 - DNA, 61 bp, Homo Sapiens
ttctccttctaagaagaaaaaggtaatacaygcttatagtctgaatttagctacaaatgat

SEQ ID NO: 3657 - DNA, 61 bp, Homo Sapiens
aagtaatttttattatttcaagtttgaatgygttggtttcagcattagattaaaagaaact

SEQ ID NO: 3658 - DNA, 61 bp, Homo Sapiens
acataatgttagccaaattctgcacaaattytatgagttaaatgttaaataaacaattatt

SEQ ID NO: 3659 - DNA, 61 bp, Homo Sapiens
aaaaaatgaagctcactgtagttgccatttygaaaagattaaaccagccatcacaaattat

SEQ ID NO: 3660 - DNA, 61 bp, Homo Sapiens
ttgaattgtatttgttttttctgcagttgtrgcacaatactggcacatagtgagcaagtag

SEQ ID NO: 3661 - DNA, 61 bp, Homo Sapiens
cttcatgagattttgaagaattaattgggartgtcaaggattaaagttgagctgtcattta

SEQ ID NO: 3662 - DNA, 61 bp, Homo Sapiens
attgtggcaaagacacacttgattccagcasttacaatctagcatgtgagacaaacagtta

SEQ ID NO: 3663 - DNA, 61 bp, Homo Sapiens
aaagctaaagatctgagggtttttaaacctrcaaatcacaccaacttcagtcaggctgtcg

SEQ ID NO: 3664 - DNA, 61 bp, Homo Sapiens
caattttttcagtgtctccaagtcatagctsttctttctataaagtgaagaaaataaatat

SEQ ID NO: 3665 - DNA, 61 bp, Homo Sapiens
aatgagtaagaagtgaggaggtgctcttttsagaagtgtggtaagagaagacctttttgaa

SEQ ID NO: 3666 - DNA, 61 bp, Homo Sapiens
agtacagtattataatcttatggtaccacartcatatatgcggcatatctttgatggaaat

SEQ ID NO: 3667 - DNA, 61 bp, Homo Sapiens
tttttcaaaaaataaagcgttaattcactarctatgagaaacccatcatttaaccaactta

SEQ ID NO: 3668 - DNA, 61 bp, Homo Sapiens
aataaatattttacctatatgaaatacagtkgccaacttctgtcattacttaatagttaca

SEQ ID NO: 3669 - DNA, 61 bp, Homo Sapiens
atttcatttatcctccaaaggaccttatgakatgggcattgttatattacacgtgaaacaa

SEQ ID NO: 3670 - DNA, 61 bp, Homo Sapiens
aggctcataaataaaacatttccttttgtaygagctgagagtataaatcttgagacagaaa

SEQ ID NO: 3671 - DNA, 61 bp, Homo Sapiens
agtaaataaataaataaaaataaggttataraaagagtctgagcgaaagatgatgaggtag

SEQ ID NO: 3672 - DNA, 61 bp, Homo Sapiens
tcgtattggaagctttagccagaacattcakgattaaaatcttcaatgacccttttacaaa

SEQ ID NO: 3673 - DNA, 61 bp, Homo Sapiens
tattttttcagtatattctaaccaatactcwtttctgaccttcagaaacacatgtctaata

SEQ ID NO: 3674 - DNA, 61 bp, Homo Sapiens
gctcagagagatagcatagtttatataagcytacacaattaatgaggagcagagccagaac

SEQ ID NO: 3675 - DNA, 61 bp, Homo Sapiens
atataaggaagtttaatttaagatgacaggwaggctttagtaatttaagcccttgtgaacc

SEQ ID NO: 3676 - DNA, 61 bp, Homo Sapiens
tttgcccacctgaggtgagagatggtccagrttagcaacaacaatctgtggactaaaatcc

SEQ ID NO: 3677 - DNA, 61 bp, Homo Sapiens
aataggtgacacaccacacataaaatggcarttagaggcaacaagataatgacacaaaaca

SEQ ID NO: 3678 - DNA, 61 bp, Homo Sapiens
aaaatgacttgtaattaataggtgacttgasagtaattcaaattcctggatatgtaaaaat

SEQ ID NO: 3679 - DNA, 61 bp, Homo Sapiens
cgacaagagtttcggaagtgatatatcacaygcaaaccatagcagtgagtgtggggaagaa

SEQ ID NO: 3680 - DNA, 61 bp, Homo Sapiens
agccttagtgaacttgttaaagatccttctragcgccatgctttcacctctaggtcttcgc

SEQ ID NO: 3681 - DNA, 61 bp, Homo Sapiens
tgtggaatgttgaactagatgcttcctgccrttaaggaccagaaatgcattaactctttat

SEQ ID NO: 3682 - DNA, 61 bp, Homo Sapiens
gtgaatgtatagatagtgtctaacatagtgyttgatgcatagtagatccagctcttcttga

SEQ ID NO: 3683 - DNA, 61 bp, Homo Sapiens
ttcctttttgttttttgtagtcactgatacktgctttacaattcttatttaatccacacga

SEQ ID NO: 3684 - DNA, 61 bp, Homo Sapiens
gaagccggatgccactctgtcagtataaatyccagtgaggctaatttagtggagctgtagc

SEQ ID NO: 3685 - DNA, 61 bp, Homo Sapiens
ttgtggtgccttaaaagaaatcagggtaacrtcaacgattactgattacagattactataa

SEQ ID NO: 3686 - DNA, 61 bp, Homo Sapiens
tgaagtaaagagactggcgggtagaaaggcrtaggatagagtcatagagtcactcagcaga

SEQ ID NO: 3687 - DNA, 61 bp, Homo Sapiens
caacccgtacacccacacctattcatactcrtgctctggctcggcaatcacctgtagcagt

SEQ ID NO: 3688 - DNA, 61 bp, Homo Sapiens
aaacaaatctccaggtgattcagtgcatatyaaaacctgagaagcacttttgagaggcctg

SEQ ID NO: 3689 - DNA, 61 bp, Homo Sapiens
gtagggaggcaatttcaggggccatcaaacrtaaacttcaccttcctctcagcctcatcca

SEQ ID NO: 3690 - DNA, 61 bp, Homo Sapiens
ttagtctttgtttcggagttgcctcttataytggtgacactccagctttgctgaagtcgtg

SEQ ID NO: 3691 - DNA, 61 bp, Homo Sapiens
agggctcagagatgttaaatagcttgcctgrtatcacaaagctaacatgtgattggctcag

SEQ ID NO: 3692 - DNA, 61 bp, Homo Sapiens
gccaaggctgagtgatttaggagtcatgatrctggagagactcaagccccactcccttcct

SEQ ID NO: 3693 - DNA, 61 bp, Homo Sapiens
gctgtaatagtaagaggcaccttcttgataygctgtcaaaatgttcttccccggaagagaa

SEQ ID NO: 3694 - DNA, 61 bp, Homo Sapiens
aatctgcaaacaagtaaagagttctttcctrtaccagccactcagtgacttacttacttaa

SEQ ID NO: 3695 - DNA, 61 bp, Homo Sapiens
atacattttgtctcatttagcaacattgcarggcagatattgtatttcccgtagaaaactg

SEQ ID NO: 3696 - DNA, 61 bp, Homo Sapiens
agtttttcccgtcacacatccccaacatccragtcgtacacattctaccttcttaatattt

SEQ ID NO: 3697 - DNA, 61 bp, Homo Sapiens
atgctctctgggaagacagagttctgaaacygactcaactatttactacttcatgtggaga

SEQ ID NO: 3698 - DNA, 61 bp, Homo Sapiens
catttgaagacaggtgaccggttcctcaagrcagcaaataatgtgttacttggataagaat

SEQ ID NO: 3699 - DNA, 61 bp, Homo Sapiens
tccacctcccctccccagcgagccagagagsgtctattgaaatgtgtccctggtttaggaa

SEQ ID NO: 3700 - DNA, 61 bp, Homo Sapiens
tgatgatcaaaggtcataagtttttgtttaytctcctcttcactgttcctttctgaaattc

SEQ ID NO: 3701 - DNA, 61 bp, Homo Sapiens
ccttaagtatttatttatatgtgttgggaawgtttcaagacctgtcttctagctattcgga

SEQ ID NO: 3702 - DNA, 61 bp, Homo Sapiens
ttatccccttatccaggaaagttaacagaaragacacgttaagagaagaaaatattctcta

SEQ ID NO: 3703 - DNA, 61 bp, Homo Sapiens
acatggcattactcttttactcttgcttttrtcaaaatgtattacactagttatattattg

SEQ ID NO: 3704 - DNA, 61 bp, Homo Sapiens
tggaagttaacatctatgccagcaacagttytctaaatttgtcctcatctttcacgtttca

SEQ ID NO: 3705 - DNA, 61 bp, Homo Sapiens
aaaaaaccaagccattttaacatttacactscatctaatatatgatcataaacacaataac

SEQ ID NO: 3706 - DNA, 61 bp, Homo Sapiens
gagagaatagtcagtacattggccctaaaaygatagaaagatgttcttggtatgatctacc

SEQ ID NO: 3707 - DNA, 61 bp, Homo Sapiens
taggtaatgatgcaatcgtaccacagaatamtttacctagtctggagggatgcattccact

SEQ ID NO: 3708 - DNA, 61 bp, Homo Sapiens
gcaaaggtcatgccatgaaactgtgcaaagratactggagaataactgaaaatgtttaggt

SEQ ID NO: 3709 - DNA, 61 bp, Homo Sapiens
atttcttcttaaaggtaggtctgtttctggmcaaaatgctacattagtttctatactaagg

SEQ ID NO: 3710 - DNA, 61 bp, Homo Sapiens
tcttaagctttaaacagcatcagttgtatcyatgatttcctcagcagcttagggtgtagtt

SEQ ID NO: 3711 - DNA, 61 bp, Homo Sapiens
ccaagtgtggtaattgctcagtagaattagytatttcacaagtaattttacagttttgtta

SEQ ID NO: 3712 - DNA, 61 bp, Homo Sapiens
aaaattttaaaggtatttgaacatatttagrgcatagagaaagaagccatagaggagaggt

SEQ ID NO: 3713 - DNA, 61 bp, Homo Sapiens
tttttgtacttcaggcaaggtactatctaarttgatgggtcaagtgttacaaaacagagaa

SEQ ID NO: 3714 - DNA, 61 bp, Homo Sapiens
ccaatgacctcccttttacaaaatccatagrccaatctctattctatttacataatttatc

SEQ ID NO: 3715 - DNA, 61 bp, Homo Sapiens
atctaaaataattaagtgactatcacttgtkgagcacctacatatgcaactttgtttcatt

SEQ ID NO: 3716 - DNA, 61 bp, Homo Sapiens
aaattaaatgagtctacccaggtaattttayagtaaatgatgcttctaagaataaaaccat

SEQ ID NO: 3717 - DNA, 61 bp, Homo Sapiens
agtaagaaccaaaatctgtaattgcaagcaycaaaccaaattaattaatatatttagaaaa

SEQ ID NO: 3718 - DNA, 61 bp, Homo Sapiens
gcaattcctaatttggagacctgggagctaraaagacaaattatctgtcccatgtacacac

SEQ ID NO: 3719 - DNA, 61 bp, Homo Sapiens
ttgtgtatcaacagatgaagtgacaaaaccrtccttagtaaattaatgtaactacaggcag

SEQ ID NO: 3720 - DNA, 61 bp, Homo Sapiens
gtggtggtggcaggcaagaggagccgtggargagaggagaaaggagaagagaaggaaatcc

SEQ ID NO: 3721 - DNA, 61 bp, Homo Sapiens
ttacaaaaggcactcctttctctggctctcmaggtagattctattacttatttgccttcca

SEQ ID NO: 3722 - DNA, 61 bp, Homo Sapiens
tctgcaccctgagaaaagagcacccgttgamttttctggaccttttttcatggctgacttg

SEQ ID NO: 3723 - DNA, 61 bp, Homo Sapiens
aaaggggatttatttcttaaaagctgccatytggtagctgagataagatgttttatataat

SEQ ID NO: 3724 - DNA, 61 bp, Homo Sapiens
tctctgaggatatctggcatctcttcctatstctgtgacctttcttttctttgcccccttg

SEQ ID NO: 3725 - DNA, 61 bp, Homo Sapiens
agtgggaaggaaatgggacagatatatagargaatagcctatgagagctgtgtgaccatca

SEQ ID NO: 3726 - DNA, 61 bp, Homo Sapiens
ctgacttattgcctcaaacctctacactaayttagaagagaagaggcatgtacactttcag

SEQ ID NO: 3727 - DNA, 61 bp, Homo Sapiens
cagaaaaccctggttgaagtcagtaacctcracaacaaggacgctttatattcttgtgcct

SEQ ID NO: 3728 - DNA, 61 bp, Homo Sapiens
atgtgaccttggtcattatccagaattggcmtatattaaaaattgtctatctctctcctct

SEQ ID NO: 3729 - DNA, 61 bp, Homo Sapiens
tacatattcattcattgtcttttctgaaaayggatggccaagattctaaaacactcaattc

SEQ ID NO: 3730 - DNA, 61 bp, Homo Sapiens
accccacaaaatcttttcgacaaaacccacrtatgaaagattcatttgtctctttcttatt

SEQ ID NO: 3731 - DNA, 61 bp, Homo Sapiens
  misc_feature (31)..(31): n is a, c, g, or t
catgttaatttttgactggactaagtcacanaacagttcagtcatatgcaatattttttat

SEQ ID NO: 3732 - DNA, 61 bp, Homo Sapiens
ggcacagcacagcttcccaggtgtaacaacktggttgggataggagaaaacggttgctcct

SEQ ID NO: 3733 - DNA, 61 bp, Homo Sapiens
tgtttgtgttaagaaacaactttgctaatcmcagaaatagctcctgctctacaggccccga

SEQ ID NO: 3734 - DNA, 61 bp, Homo Sapiens
attgcagataatgttaatgaaatgcctaacraaggacctggtctaaagtggagattcagtg

SEQ ID NO: 3735 - DNA, 61 bp, Homo Sapiens
aaagcattactgattcttcaaaatgctatamattcttttgtatcttctcaaatatagtttg

SEQ ID NO: 3736 - DNA, 61 bp, Homo Sapiens
ttaacatcactcctgcctgcctgacttttaytggcctcaggcagacaggagtccaaactgc

SEQ ID NO: 3737 - DNA, 61 bp, Homo Sapiens
ttatcttcattgaagcttcagagtattggaycctaaaactgtaaggagtaagaaaatgatc

SEQ ID NO: 3738 - DNA, 61 bp, Homo Sapiens
gttaacgggttccagttctttcagataaacmacaccatctatctcgtttgctatgtaacga

SEQ ID NO: 3739 - DNA, 61 bp, Homo Sapiens
gaccctaacccttaccggcaggttcctgtakctggtgctgctcctgggacgatgtagacgc

SEQ ID NO: 3740 - DNA, 61 bp, Homo Sapiens
gctagtaccatgattgatagtataaggcctrcattgtatgtgtagtgtaatattttgttcc

SEQ ID NO: 3741 - DNA, 61 bp, Homo Sapiens
ggttctcaggagaaagaggatcaaccggatrtatattgaaagagatttattataaggaatc

SEQ ID NO: 3742 - DNA, 61 bp, Homo Sapiens
gtccctagatgcttatcaagtattactgtcrttactatagttcactgtttcattacattat

SEQ ID NO: 3743 - DNA, 61 bp, Homo Sapiens
ttaaaagaaacagaaaaggtagctgatttgkaggcaagagatggaaattaattttttgaca

SEQ ID NO: 3744 - DNA, 61 bp, Homo Sapiens
atttaaaccagatgcagtccatatacttttycttcctgtgactgctcatgaaatcatgatt

SEQ ID NO: 3745 - DNA, 61 bp, Homo Sapiens
tggggaaaaatttcctgtctgtcttggcccygatctgcggagctggttctgtgagtggctt

SEQ ID NO: 3746 - DNA, 61 bp, Homo Sapiens
gctcatatatgaacatttaaatgcttggctrttcttagctaggcctttgatggactctggt

SEQ ID NO: 3747 - DNA, 61 bp, Homo Sapiens
cgttcacggagcacacaaatggaatcaactygtgtttcagcttctctccccagaagttacc

SEQ ID NO: 3748 - DNA, 61 bp, Homo Sapiens
cttccacctggctgcaattggatctgcgtgytaaccttttagtttcaacttgcagtggatc

SEQ ID NO: 3749 - DNA, 61 bp, Homo Sapiens
tgagtagtggcaagtaaaaaattgggatttsgtagatgttgtaacatttgaaattcttttt

SEQ ID NO: 3750 - DNA, 61 bp, Homo Sapiens
tgtaatttaattgatgataatggcttcagayaatattccagagcttgcatcgatgatttgt

SEQ ID NO: 3751 - DNA, 61 bp, Homo Sapiens
cctgttcacaaaagccatttccatgattgartgtgctcttactcttacaattttggttgtc

SEQ ID NO: 3752 - DNA, 61 bp, Homo Sapiens
acaataaatatttagaccaaattgggaacaygacctcttcacagaggagatccaagaaaga

SEQ ID NO: 3753 - DNA, 61 bp, Homo Sapiens
tcaagctacaaacaagctttggtccttaagwtttgacacatagttcagctatgtggtagtt

SEQ ID NO: 3754 - DNA, 61 bp, Homo Sapiens
gcgaaacatctctttgcatacaaaggtactrtgattcgatctccccaacgatttttaataa

SEQ ID NO: 3755 - DNA, 61 bp, Homo Sapiens
tgcctctcaggcaaatctccctctgctctcrtcccacgaaaagggggtgcccaattccagt

SEQ ID NO: 3756 - DNA, 61 bp, Homo Sapiens
gcttgtctcttaacctctgggcatctgtttsatcctctgggaacactgtttctattccatg

SEQ ID NO: 3757 - DNA, 61 bp, Homo Sapiens
acagattccggagcctccagattaaagaatsatactgtttgagggtagagtcaggggagtc

SEQ ID NO: 3758 - DNA, 61 bp, Homo Sapiens
catactgtgttccaagtcttatattaggtaytgaaatgactgtagtgagaagaatgaaaag

SEQ ID NO: 3759 - DNA, 61 bp, Homo Sapiens
ctgcttacatactaactacccaagcctttgmtgcctagtactggcaacatggttaaacatg

SEQ ID NO: 3760 - DNA, 61 bp, Homo Sapiens
acctaatttttggtattcatccatttttcckgagaacaacacttttctcattcttgctgtc

SEQ ID NO: 3761 - DNA, 61 bp, Homo Sapiens
atcagatctgaaggtagtcctgagtaccccyaacatacatagtatagtcagaaaaagttgg

SEQ ID NO: 3762 - DNA, 61 bp, Homo Sapiens
catctgattctggataatgataggatctagratatggaagtagtgatgagccttaaaatga

SEQ ID NO: 3763 - DNA, 61 bp, Homo Sapiens
taccatcatgattagatttctcagtgaggtrtagtatttaagaccattggacaatgtatca

SEQ ID NO: 3764 - DNA, 61 bp, Homo Sapiens
aatatgaatacatattacaaccctcactgtrtgcgcttaaaagatctaaagcgttccaata

SEQ ID NO: 3765 - DNA, 61 bp, Homo Sapiens
tctgtcagtttctcaatctctttccacatcyacctttgagagtctgatatatatgattaca

SEQ ID NO: 3766 - DNA, 61 bp, Homo Sapiens
taataaaacacttacacttattggatatttwctatgggtgacactactattaaagtatata

SEQ ID NO: 3767 - DNA, 61 bp, Homo Sapiens
attctgatttcaacttattgctcttttgggktgaagtggaagatcctgaatgactgctcac

SEQ ID NO: 3768 - DNA, 61 bp, Homo Sapiens
ctacttaattatcgaaagctgctgggtaacstgggctctacagctaaagtgatctcatagc

SEQ ID NO: 3769 - DNA, 61 bp, Homo Sapiens
ccactagacactctttcgcattacacctgaytcaaatttgacagccttttgaaagacatag

SEQ ID NO: 3770 - DNA, 61 bp, Homo Sapiens
ctaaaatacttcgtgccccactccattttartgttatcaggctattgtgtaattttccttt

SEQ ID NO: 3771 - DNA, 61 bp, Homo Sapiens
ctgtttacaaattcttcaggattaacatccrcaccaaataaatacagccccacatcagtga

SEQ ID NO: 3772 - DNA, 61 bp, Homo Sapiens
gtccaaacgcgttttccccttctcttcctaamcttcagggactttccaggtcctgcgtgag

SEQ ID NO: 3773 - DNA, 61 bp, Homo Sapiens
aaagtcatgacatttgcttagcgtcagtcartctagtgcagtgtgggagtttttgagtgat

SEQ ID NO: 3774 - DNA, 61 bp, Homo Sapiens
gctggagttctcttggttcctttagcattcrgtcttctctcatgactcttgttggtgtttt

SEQ ID NO: 3775 - DNA, 61 bp, Homo Sapiens
gacttgccctcccttcctgtcatgttccagrtctattaaagtacatgcagtacttcagcca

SEQ ID NO: 3776 - DNA, 61 bp, Homo Sapiens
agttttataattatttgagaaatgaattgcrtaaagcagaaagaatatgggtagttactgc

SEQ ID NO: 3777 - DNA, 61 bp, Homo Sapiens
gctgaaatgtacaaaggtgtgatatatgtaygtaatggcaaataaactagtattgtctggg

SEQ ID NO: 3778 - DNA, 61 bp, Homo Sapiens
agaaatcatgaaaggactgagaaaggagaaygggggaagtatgaaggatgaaggggagatt

SEQ ID NO: 3779 - DNA, 61 bp, Homo Sapiens
ctcttcttacctcaatacatcaaaggctacytcaagttacaatttctccctcagtttttcc

SEQ ID NO: 3780 - DNA, 61 bp, Homo Sapiens
cttgcttagcattcattacatctctgtttayagactccgttttgctttctaagatgctccc

SEQ ID NO: 3781 - DNA, 61 bp, Homo Sapiens
attttaacatggatttaagtagttaagtgayctcatcagatttacaccttaggaaacttgt

SEQ ID NO: 3782 - DNA, 61 bp, Homo Sapiens
attaccatcaagagagacatatggtatgtcrgtggtacagcttactaaggtgtctgagagg

SEQ ID NO: 3783 - DNA, 61 bp, Homo Sapiens
agaggagagagaaaaagacacagcaaaatasggtcagagagacaagaagagaacaaccaaa

SEQ ID NO: 3784 - DNA, 61 bp, Homo Sapiens
gaacaaccaaacagtatatttggcactgtarggagtaaaagattgagagattttttcccct

SEQ ID NO: 3785 - DNA, 61 bp, Homo Sapiens
aatctcagaaaaagatcacccgtaagcatartagtacaggggtagtctgaagtttgactaa

SEQ ID NO: 3786 - DNA, 61 bp, Homo Sapiens
taacataataacacaggaagttcctatattygttgacttccatgacatcctatcaaatgta

SEQ ID NO: 3787 - DNA, 61 bp, Homo Sapiens
tcatttgatatacatactatattaaggctgyagttgataccctgacaagtatgtaattcat

SEQ ID NO: 3788 - DNA, 61 bp, Homo Sapiens
ctactattgctataaaacattaagatcaaaragagaactatatctcaaaattctgtttcac

SEQ ID NO: 3789 - DNA, 61 bp, Homo Sapiens
aagaacccaggttaagctggtagttgtacargcgaatcaggtataaagagcagatgaactc

SEQ ID NO: 3790 - DNA, 61 bp, Homo Sapiens
ctgcattcattcagagaagatcctttgacarctagtgagatcccaggcactaatttgtcat

SEQ ID NO: 3791 - DNA, 61 bp, Homo Sapiens
aatccatgaagtgtttccatatgtgctttcrtccctaaagagtgatgatgatgttggctcc

SEQ ID NO: 3792 - DNA, 61 bp, Homo Sapiens
ttctttgcaaatagcctgctgctgtatacayctatgaaatctaagatctattaaagttttt

SEQ ID NO: 3793 - DNA, 61 bp, Homo Sapiens
aagacccatttctagccaatgtgatttatgragatttctgaaaaaaaaaaaaaaaaaaaag

SEQ ID NO: 3794 - DNA, 61 bp, Homo Sapiens
atgccctcgagaagtccccagatcgcagccygctccagtacttgggctcatggtggcaaaa

SEQ ID NO: 3795 - DNA, 61 bp, Homo Sapiens
gtctcttcacttttgaggtgtcaacctggtrtatagtgaaaaatgttaaggataggcaaat

SEQ ID NO: 3796 - DNA, 61 bp, Homo Sapiens
ttaggaattcagatggtagcaatgggtagcktatactcagtaagagaggaacacaggtgat

SEQ ID NO: 3797 - DNA, 61 bp, Homo Sapiens
aagtgggacaaagagatcccaggaggggagycttaaaaagcaagtggaaattcccaggaaa

SEQ ID NO: 3798 - DNA, 61 bp, Homo Sapiens
agcctctatagaggattcattaaattctccyaatgcttgctgatgtagcctggtgacccat

SEQ ID NO: 3799 - DNA, 61 bp, Homo Sapiens
gtaggagttttaagttgctcttaggtggttyttattcgctgcaggttatgttagcttattt

SEQ ID NO: 3800 - DNA, 61 bp, Homo Sapiens
aggtatctaaaatgagcagcattggtgaatwaaattgttcaattttgtaattgtttaaatg

SEQ ID NO: 3801 - DNA, 61 bp, Homo Sapiens
gatgattaataggggaaagtgttttaggtgrttgttatgtctgtcaagctcaaatgcagat

SEQ ID NO: 3802 - DNA, 61 bp, Homo Sapiens
aataattatacatcacgtgatatacgtgacraaaacaaatgagtgaatcaaagaatatcta

SEQ ID NO: 3803 - DNA, 61 bp, Homo Sapiens
tctgttatgggctgagttgtgtgttcccccraaatattcacatgtcaaagtcctaacaacc

SEQ ID NO: 3804 - DNA, 61 bp, Homo Sapiens
tgtcttgttttaaggaagcctgctaaaaatyaacacatattgccatatgaaagtgaaattt

SEQ ID NO: 3805 - DNA, 61 bp, Homo Sapiens
gggtttcacttgtggcccccatgtttatcartccttactgagcaacttttggcaacatgct

SEQ ID NO: 3806 - DNA, 61 bp, Homo Sapiens
ttcaagatatattgataaatgtaaaaatcartttgcagcactctatgtaaagtactatctc

SEQ ID NO: 3807 - DNA, 61 bp, Homo Sapiens
tttgctaatggaggaaatttatccttctacrctcatcttactgtgactcaaaactctcaaa

SEQ ID NO: 3808 - DNA, 61 bp, Homo Sapiens
tgatcaatctttgccaggttagtcatgaaaytgattcttctgaaaagctagatacacttcc

SEQ ID NO: 3809 - DNA, 61 bp, Homo Sapiens
aagcaaaagaatattggaggcaaaacaacaycatattcaagactcttctgatcttagacaa

SEQ ID NO: 3810 - DNA, 61 bp, Homo Sapiens
agcaatatgcatcttgatgtaaagatttgtyatggaacacaaccaaactcatttaaccagt

SEQ ID NO: 3811 - DNA, 61 bp, Homo Sapiens
gccattgttttctggttttaaactttattcrctagacatttgttaatttaatattttagaa

SEQ ID NO: 3812 - DNA, 61 bp, Homo Sapiens
gaaaggggcaccatcatgggatagtttttasatgaaaatttggaatgggggttaggacatt

SEQ ID NO: 3813 - DNA, 61 bp, Homo Sapiens
tagaccttggccatgcaatatgctgactctycttcttcatagcccttcatccatcagagaa

SEQ ID NO: 3814 - DNA, 61 bp, Homo Sapiens
tttcttttgcttcatatgggctaccagacckctgcttttgagcacacctctgttgggtaac

SEQ ID NO: 3815 - DNA, 61 bp, Homo Sapiens
ttttttaaagtttagactgaaggtgatgtcrtagatttaaacagtctctccctaaccaaaa

SEQ ID NO: 3816 - DNA, 61 bp, Homo Sapiens
actctagctagatcctctttataagcaggtrctttcgattcccagccacacctttctctga

SEQ ID NO: 3817 - DNA, 61 bp, Homo Sapiens
attattctgggcattgtttgatgcatgaagkaggctttacgtaaatagtaaaaaagctgtt

SEQ ID NO: 3818 - DNA, 61 bp, Homo Sapiens
attagtgctgttttcctgattttactatccyttaacattatccaagaataccaatacattt

SEQ ID NO: 3819 - DNA, 61 bp, Homo Sapiens
tgactgtgttgaaaaaaatagagaccacacrttaggtatacctcaagaccagcacccataa

SEQ ID NO: 3820 - DNA, 61 bp, Homo Sapiens
gaatttttctattgaatgcagtgatccacaytttgtagaatgaggggacagaataacaagt

SEQ ID NO: 3821 - DNA, 61 bp, Homo Sapiens
agagaacgtgatagacacataaaatgctctyatttcgggctgctgagattcctgaaactgc

SEQ ID NO: 3822 - DNA, 61 bp, Homo Sapiens
tcagttaacattcttgagaaggagataaacmgtaagcaagtgaacaggcacgtaaataata

SEQ ID NO: 3823 - DNA, 61 bp, Homo Sapiens
aatgacaagaagaggaagagcagactgcagstactttggctaattttaagaaaccttgggt

SEQ ID NO: 3824 - DNA, 61 bp, Homo Sapiens
actctctcattgtttacaggctctataaaaygccgacacctctgagagaactttctggttt

SEQ ID NO: 3825 - DNA, 61 bp, Homo Sapiens
ccaatatggtgaccactagctccatgcagcratgtaaatttaaatttatgttaattaaaat

SEQ ID NO: 3826 - DNA, 61 bp, Homo Sapiens
gatgttgccaacttgctttccaaagagcaawaaccaaaacaaatttcctaccagcaataca

SEQ ID NO: 3827 - DNA, 61 bp, Homo Sapiens
gttgcatgaatgaaatgtcattaactgagtyaagaaacactagcatacaaccgtatttggg

SEQ ID NO: 3828 - DNA, 61 bp, Homo Sapiens
gggcacagccacctgctttccctgcatactyaccaactgctgcagagaaataaacttctgt

SEQ ID NO: 3829 - DNA, 61 bp, Homo Sapiens
acattttactttaagaatgcatttgaaacayaccaactagaacacagtagaccaaagcaat

SEQ ID NO: 3830 - DNA, 61 bp, Homo Sapiens
ggaaagttatcttgtctcaaatccatgccartatcagtgtaatcaaacttattgttgctca

SEQ ID NO: 3831 - DNA, 61 bp, Homo Sapiens
attttcataatgtagagcaagaatagcaagrccaagaacagataaaacaaatctgaagaag

SEQ ID NO: 3832 - DNA, 57 bp, Homo Sapiens
cagtgccaaaatctcccctgaaatgaccagygatgggacaagatatattctcttctt

SEQ ID NO: 3833 - DNA, 61 bp, Homo Sapiens
agaattatactaataatgcatattttctgartgttaatgtcatgtgaaattgctactaagt

SEQ ID NO: 3834 - DNA, 61 bp, Homo Sapiens
gattatttgcaagggtagagtaagaatcgtygcttctctggacacataacccatttgccat

SEQ ID NO: 3835 - DNA, 61 bp, Homo Sapiens
tcatcttggaccccagctttggatcagcctragaagtggtatcatctctacaccatgtgac

SEQ ID NO: 3836 - DNA, 61 bp, Homo Sapiens
ttcctctcatgtcccagaccctactgctctraactcttcaggttccccatgtgcagcggga

SEQ ID NO: 3837 - DNA, 61 bp, Homo Sapiens
cagcctttaactggtgaaagttgtgagtgtygtcagattcactttccctgttgaagaacct

SEQ ID NO: 3838 - DNA, 61 bp, Homo Sapiens
aacacatggtagatggaggtctgattcaggyggtgttaaaaatcaaacaaaaatctttcca

SEQ ID NO: 3839 - DNA, 61 bp, Homo Sapiens
aaacctcagatcttttgcagttcttcacaaygctgtcttgtcacccatgtgttcctagcac

SEQ ID NO: 3840 - DNA, 61 bp, Homo Sapiens
tatgggttttaacatgaaaaaccagcagtcytggattagcattactccggagcagaaggtt

SEQ ID NO: 3841 - DNA, 61 bp, Homo Sapiens
taaagaatcccccacacaaagctgacaaatyatgcctgaggagaagatgtttcatagacag

SEQ ID NO: 3842 - DNA, 61 bp, Homo Sapiens
aaaaatcatcaagtgtaaggcagaagaccartcctagaggctgagttaactggcaaccacg

SEQ ID NO: 3843 - DNA, 61 bp, Homo Sapiens
cttaagtaaacaaatttaaaattcaaattcrttgtggaaatggtcattgatttttaggtta

SEQ ID NO: 3844 - DNA, 61 bp, Homo Sapiens
aagatgaaaggatatgataagttcaggtaaytgtttcatccagcttatgtatatccaaggt

SEQ ID NO: 3845 - DNA, 61 bp, Homo Sapiens
tgcaatttgggatgcatgtctttgtctaacrtagataagtagattcacattttgcagggtt

SEQ ID NO: 3846 - DNA, 61 bp, Homo Sapiens
catgacgtggctaacatttaccttcattttygtagggggtggagaaaggtatttttttata

SEQ ID NO: 3847 - DNA, 61 bp, Homo Sapiens
aagtaaggttttacatgtcattatacacaaytgcagagttttttgagaggctctaatgaaa

SEQ ID NO: 3848 - DNA, 61 bp, Homo Sapiens
tgtatctattatctatctatatcaatcatcyatatgcctgttctctctctaaccaacgata

SEQ ID NO: 3849 - DNA, 61 bp, Homo Sapiens
aaagctgtttagactgagagaacttctgtcytggataccattcatcatctcatttattttc

SEQ ID NO: 3850 - DNA, 61 bp, Homo Sapiens
tcattgtgggaagtgcatttgttctgctgargagtggtatatttctggggagttctgtgac

SEQ ID NO: 3851 - DNA, 61 bp, Homo Sapiens
ctgtttcctcgtaacttggctaaacaaatgratttataaccaattatgaggactcaataaa

SEQ ID NO: 3852 - DNA, 61 bp, Homo Sapiens
gggcagaaagcaaaggtctaacttaatgacrcacaaagagtcatcttttaccttcagctag

SEQ ID NO: 3853 - DNA, 61 bp, Homo Sapiens
ggaggagggggcttgatatggctgaagtggycctctatttctgctagcaatattccccaat

SEQ ID NO: 3854 - DNA, 61 bp, Homo Sapiens
gcatttacaatataattttatgttatcgaartaatgtaaaatgtttgttgtacaggcatac

SEQ ID NO: 3855 - DNA, 61 bp, Homo Sapiens
gggctgtaaagggcacggcaaggagagaacsagtgatgatgtgtagggttggggagagtgc

SEQ ID NO: 3856 - DNA, 61 bp, Homo Sapiens
taaaagtacaaattactgtcaaaaatggtgrtattgagggggagtggagacaagtcagcaa

SEQ ID NO: 3857 - DNA, 61 bp, Homo Sapiens
tctgcttgtgacctaaaatagtcatgctgarctacctcaaatgagcattgattttcaaatt

SEQ ID NO: 3858 - DNA, 61 bp, Homo Sapiens
aacatgcacttagaaggcaggaaaaaattayctgggaattcataaccccaagtttgccttc

SEQ ID NO: 3859 - DNA, 61 bp, Homo Sapiens
ctctctagtcacttgctcccactggtctacygataaatgttaaaacaaactaacctctttt

SEQ ID NO: 3860 - DNA, 61 bp, Homo Sapiens
tagagttaaatttgcaggattctgaaggacytctgtacttgtaattggccagacccaaaag

SEQ ID NO: 3861 - DNA, 61 bp, Homo Sapiens
ttttaaattattgctatgtatatcacagtarcctcaacatcaacatttaattaatttcttt

SEQ ID NO: 3862 - DNA, 61 bp, Homo Sapiens
atttttccatatgatttctaccaattgcccrcgaaatctcaagggaaaacagttacagtta

SEQ ID NO: 3863 - DNA, 61 bp, Homo Sapiens
taaattcatcagcagctttattcactctttkcagttttctgatcagtgcttcctctttctc

SEQ ID NO: 3864 - DNA, 61 bp, Homo Sapiens
gaaaaggggaactggtgcttttagatggagygcataaaattacctcacaccatctgtgtca

SEQ ID NO: 3865 - DNA, 61 bp, Homo Sapiens
tttgagacctaccaagctttgtgttaagagygaaacctgtaggcaattaaacatttgagcc

SEQ ID NO: 3866 - DNA, 61 bp, Homo Sapiens
ttattcctccattattagaccatttgccttsgtaaaagaactaattactaaattcactacc

SEQ ID NO: 3867 - DNA, 61 bp, Homo Sapiens
cactaaataaaaatacaaattgtcaccaaartatctgtttttcctccttccatttctcctg

SEQ ID NO: 3868 - DNA, 61 bp, Homo Sapiens
tgaaatctcaacctgcctgattgtagaaccygaactcttcttgtcatccagccgctctctc

SEQ ID NO: 3869 - DNA, 61 bp, Homo Sapiens
gtgaggaggcagggaggatggaaccttcttragcataggtaatttgtcagttgaaaatcgc

SEQ ID NO: 3870 - DNA, 61 bp, Homo Sapiens
tatgagtgttagttttccaggcaaacaagcyacggattggtggggatgaggggagcatttg

SEQ ID NO: 3871 - DNA, 61 bp, Homo Sapiens
ctaaggaaatgctatgaaaatcagtgcacawctattcacattcccctttttccttctaaaa

SEQ ID NO: 3872 - DNA, 61 bp, Homo Sapiens
gttttctccataaaaatgctgaacatctggstatttgcgcccatacaggtgattggctgag

SEQ ID NO: 3873 - DNA, 61 bp, Homo Sapiens
acaggtgattggctgagtttgacccctttcrtctggtagtttggcatgaggaaaacactgc

SEQ ID NO: 3874 - DNA, 61 bp, Homo Sapiens
aagctgactcttgggttgtcagcatggtgcrtctttatcctgtgtatatcacagaaacaca

SEQ ID NO: 3875 - DNA, 61 bp, Homo Sapiens
aactaaaacaggcccgttattgtgtagaaayagatgtgcctaaaggtgtggtccccaaatg

SEQ ID NO: 3876 - DNA, 61 bp, Homo Sapiens
tgtgagcactataattcatgaacagagtagrtgactatttgaaaagtattaaaatgagctg

SEQ ID NO: 3877 - DNA, 61 bp, Homo Sapiens
gaatgagccatttcttttgacccattttttyctacttgccagttctatttacattctctat

SEQ ID NO: 3878 - DNA, 61 bp, Homo Sapiens
aggagcatgtgttactcctctttgtgtcacstgttttgcagagtacactgtaggtgctaaa

SEQ ID NO: 3879 - DNA, 61 bp, Homo Sapiens
ggcacaccttaggggaggatgtagctctcartcatgaaactaacacatttccacatttctt

SEQ ID NO: 3880 - DNA, 61 bp, Homo Sapiens
ttagcactgtcaaaggaagtttgtgatttamaattgttaatagtcaaatatatagaaagca

SEQ ID NO: 3881 - DNA, 61 bp, Homo Sapiens
ttgtctttgtattccccccatttttgctaamccaggattaaacaccatgctttcgtgtgtg

SEQ ID NO: 3882 - DNA, 61 bp, Homo Sapiens
aggatttatcacctaggcactaacagagagrtgacatcaagtaggcaggagcagactcaca

SEQ ID NO: 3883 - DNA, 61 bp, Homo Sapiens
atgattgtgaatctttattcaacatacttawcattatgcaggtcaaataccacccagtatc

SEQ ID NO: 3884 - DNA, 61 bp, Homo Sapiens
tggaatatggacacaggctgccatgttagayaacaaggtaactttgggcatagaggccaca

SEQ ID NO: 3885 - DNA, 61 bp, Homo Sapiens
agcattaatttacttattcatcaaatacttwttgagcatactgagtaccagccattgtgca

SEQ ID NO: 3886 - DNA, 61 bp, Homo Sapiens
gtgggtttatcccaggatctacagtttgaamgttatgtcttgctccatcctctgcaattgc

SEQ ID NO: 3887 - DNA, 61 bp, Homo Sapiens
tggaaagacaggtaagaccagatggtgaagractaaggaggctttgatcatccttgaacac

SEQ ID NO: 3888 - DNA, 61 bp, Homo Sapiens
aaactccgctctcctgtttaactggttctgmatatgtaaagctctttctctattgcagttc

SEQ ID NO: 3889 - DNA, 61 bp, Homo Sapiens
ctaaaatagctgtgtgacctcggtaaattayaactcagagtgtcggtttccacatatgtaa

SEQ ID NO: 3890 - DNA, 61 bp, Homo Sapiens
aggcaaacagggtcttgagtggatcttgctsagtaggccaagcctcagcaaaccccaacag

SEQ ID NO: 3891 - DNA, 61 bp, Homo Sapiens
gtaatttcttacatggtggcgtaaattttcrctttctaaatggtatctttggatatacaga

SEQ ID NO: 3892 - DNA, 61 bp, Homo Sapiens
atagtttttcaaaatgcacaattgagcaaayatatcctaatgcagaaatgtgttcacagat

SEQ ID NO: 3893 - DNA, 61 bp, Homo Sapiens
tatacttgttcctaattggtatcatcgtatrgaggtgaaaacaggaaacagtctcagaaaa

SEQ ID NO: 3894 - DNA, 61 bp, Homo Sapiens
agttttaagaagaagtagatctttcacattkccaaatgatccaagaaatagaaaattaaat

SEQ ID NO: 3895 - DNA, 61 bp, Homo Sapiens
gtatatataaaagtaaagtaagtggcaaggktcatatttcaatttagtgagaaaagcatga

SEQ ID NO: 3896 - DNA, 61 bp, Homo Sapiens
aatatgtaaatggagttgtattttaaaaggsaatgtcatgcagcagttaaaatgaaacata

SEQ ID NO: 3897 - DNA, 61 bp, Homo Sapiens
tgaatacactaacacggagatttgctattayccaataatcagctaacatgatgttcacagt

SEQ ID NO: 3898 - DNA, 61 bp, Homo Sapiens
aacacattagttacaattgaaacaagagaaktagccacaacaaacttgaaagatcacaaga

SEQ ID NO: 3899 - DNA, 61 bp, Homo Sapiens
ggctagacctctctgattgaatccagagaaygaagaaatttgtgccctctctgaatgctca

SEQ ID NO: 3900 - DNA, 61 bp, Homo Sapiens
ggcactgttgcctaaatagccttcaggaatwgctgctttgaaaataaccacaaaatacatt

SEQ ID NO: 3901 - DNA, 61 bp, Homo Sapiens
ttttttctttctttgttcttgtttttctctrttctctcagtagtctacatctccttggaaa

SEQ ID NO: 3902 - DNA, 61 bp, Homo Sapiens
aaattagatggtgagcttttcaagggttagratagaaacaatgacctacttaggttttggt

SEQ ID NO: 3903 - DNA, 61 bp, Homo Sapiens
taaatccagtcacataaatctgcttcaaaartgaatgaattgtttgaataacttctgcatc

SEQ ID NO: 3904 - DNA, 61 bp, Homo Sapiens
tatttcaagtagacttaaatctagcaatttsgtatccacttagagttgaacaatgacaaaa

SEQ ID NO: 3905 - DNA, 61 bp, Homo Sapiens
gagttggacacaggagtcagtacttagccckgagaacatctcaaaaccaaccctccctcac

SEQ ID NO: 3906 - DNA, 61 bp, Homo Sapiens
caagaatatcctccatttctctactgttgarataaggggaaagaagacaataaaacaaaca

SEQ ID NO: 3907 - DNA, 61 bp, Homo Sapiens
aaactgggctgactggttctactctagattsactgcatctccgcagggccattgctgttct

SEQ ID NO: 3908 - DNA, 61 bp, Homo Sapiens
aagcaaaggagcttcctaagagaagataacrcgctgagccatgcccatggcctttgcctcc

SEQ ID NO: 3909 - DNA, 61 bp, Homo Sapiens
tctatttttttaaacaactcatttttaaccrtcttggtgaaagagacaaggacgtaaattg

SEQ ID NO: 3910 - DNA, 61 bp, Homo Sapiens
tttttgtaggatgctttgactctaactagcrttgagcaataacatctgaaacagttagagg

SEQ ID NO: 3911 - DNA, 61 bp, Homo Sapiens
cctgcactgagtttgggtttgaagaaggccrgagaatttccccgagctttttgaatatgct

SEQ ID NO: 3912 - DNA, 61 bp, Homo Sapiens
gcaggtgagaatctagttgtgtggctttagmgtggtttcagtgactgttacaggcctgtct

SEQ ID NO: 3913 - DNA, 61 bp, Homo Sapiens
cgtattggcacggttgtcttccaaacccatygatgccggaacatgggtcaggaagaacaca

SEQ ID NO: 3914 - DNA, 61 bp, Homo Sapiens
aaacatgcacccaacccagccttggatgccrccaccaggtttttgaagcccttttgagtct

SEQ ID NO: 3915 - DNA, 61 bp, Homo Sapiens
tgagggctggcgagtttgaaatttgtgcaayaggctggaaactcagccaggatttgatgtt

SEQ ID NO: 3916 - DNA, 61 bp, Homo Sapiens
tcagccaggatttgatgtttcagccttgagrtagaacttctttcagaaacgtcagttcttg

SEQ ID NO: 3917 - DNA, 61 bp, Homo Sapiens
gtttgccagaatctgcttttcttttgctaargtggtcaaagttctgtaaggaggacacatt

SEQ ID NO: 3918 - DNA, 61 bp, Homo Sapiens
ccccttggttttagaagtaaaatgtccttgmaaagagaaaagtttccataaagaattttgt

SEQ ID NO: 3919 - DNA, 61 bp, Homo Sapiens
ctaaaatcagggaaaatcaatagcctgagasgaagttgtacatacacacacccaggcattt

SEQ ID NO: 3920 - DNA, 61 bp, Homo Sapiens
aaataaatgtactgctcattgtagatttcaytttcaaaacagataacaatgcccagtgagt

SEQ ID NO: 3921 - DNA, 61 bp, Homo Sapiens
aaatcttcataaacactcaatttcagttctsaccaaatatggagtcaaaccaactaagcca

SEQ ID NO: 3922 - DNA, 61 bp, Homo Sapiens
tcaactaaatacaggctctaatagagaattrctatctgatcctcttaggcacattaattca

SEQ ID NO: 3923 - DNA, 61 bp, Homo Sapiens
cacatgttagagactgttctaaaacttttayaaatattgtcgctagtcctcacaaaacccc

SEQ ID NO: 3924 - DNA, 61 bp, Homo Sapiens
taaatgctccagagtgtctaagtaccgtatrtaattagtagctaacaatttcagaaatcac

SEQ ID NO: 3925 - DNA, 61 bp, Homo Sapiens
atagcttcagttaatacttggtcacctgctkaaactacatataagaaaccaaggaagggca

SEQ ID NO: 3926 - DNA, 61 bp, Homo Sapiens
ccactatgcacacaaatgctttcctctctaraccacgcggctcacttgtttaccccaatgc

SEQ ID NO: 3927 - DNA, 61 bp, Homo Sapiens
ggaaggtcgatgacccagttaacaagccaaytggcaaatggaacagggtatttatgaaaaa

SEQ ID NO: 3928 - DNA, 61 bp, Homo Sapiens
gaagggtaaagttaactttctaagacatacragaggagttgaaattagatgtgaatctaga

SEQ ID NO: 3929 - DNA, 61 bp, Homo Sapiens
agatcggcaatggctagtgacatgtttgtgrgccaattataaggtaaatgtaagtcagtat

SEQ ID NO: 3930 - DNA, 61 bp, Homo Sapiens
caaagtatgaatggagcatggccttctaggsgtagggcatgtcagaagtatgatagttatc

SEQ ID NO: 3931 - DNA, 61 bp, Homo Sapiens
aacctacggaatgggaggaaatacctgcaarccttatgtctaataaggggttaatattcaa

SEQ ID NO: 3932 - DNA, 61 bp, Homo Sapiens
aagtctaactatcagtgagcgagcagggggwgagcattttctttctgaagggagttattac

SEQ ID NO: 3933 - DNA, 61 bp, Homo Sapiens
aacctgaacctgattctctttgacaggcctmatcactcaccactctacgcaatatgaaaat

SEQ ID NO: 3934 - DNA, 61 bp, Homo Sapiens
gctggcctaccaaggagtttggacaaagctyccgggatctcacttggtggagctcctgggc

SEQ ID NO: 3935 - DNA, 61 bp, Homo Sapiens
tgctttctgccttctgtgttgtttcggttcyagtgaccaagggcacagcttggtgactggc

SEQ ID NO: 3936 - DNA, 61 bp, Homo Sapiens
ttatcaggcaaggtatatggctggtagaaarctctgagtccaaggcaaagtgactatccac

SEQ ID NO: 3937 - DNA, 61 bp, Homo Sapiens
ctccccccatcatgactattgccctactttragtagacatagattgagaatatgttttggc

SEQ ID NO: 3938 - DNA, 61 bp, Homo Sapiens
atgtgccttgtggccattgggtagccgtcastagttagcggcaggtggtgatggtggagtt

SEQ ID NO: 3939 - DNA, 61 bp, Homo Sapiens
actcttctggcactcagccatggactaaaaygaggttcatgcccacagtattggtctgcag

SEQ ID NO: 3940 - DNA, 61 bp, Homo Sapiens
ggcaaagaagaaagaacaaaggaaaatgaargtattagaagataaaagcttgcacttcaca

SEQ ID NO: 3941 - DNA, 61 bp, Homo Sapiens
caggcaaacctaccgcctggcctggaagatkgccaacgctcttttttggcaaagcgttcag

SEQ ID NO: 3942 - DNA, 61 bp, Homo Sapiens
gttcacactgaggaataccgagttcccttcyggcactagacttaggaggacatccacaagc

SEQ ID NO: 3943 - DNA, 61 bp, Homo Sapiens
cttagaaggctcatttactaaagaggtcctwtttccttatgtttgcccacaatttactaag

SEQ ID NO: 3944 - DNA, 61 bp, Homo Sapiens
ggccattttcatagaaaccatcaatgtaacygatacttctggtttcaaataatatgctaga

SEQ ID NO: 3945 - DNA, 61 bp, Homo Sapiens
cttaatctgcctatatgcttttcaaaattcrggaaccaaaggacttagttttcactatata

SEQ ID NO: 3946 - DNA, 61 bp, Homo Sapiens
gacacacccaataaggatttttgctcccaakgtttcacagaatgtgcacttaccaaggtca

SEQ ID NO: 3947 - DNA, 61 bp, Homo Sapiens
gcagtttcttaaaggtgtttgatgcgttctycctgaacatgagaatcacttgtgtaacttg

SEQ ID NO: 3948 - DNA, 61 bp, Homo Sapiens
cataggctgtttggagcctagactccaaacygtattgccaagaaactgtaagaataatact

SEQ ID NO: 3949 - DNA, 61 bp, Homo Sapiens
ctttagtaacaacctcttaaaatcctgtcarcttataactgtgaaagcaaaggcatatctc

SEQ ID NO: 3950 - DNA, 61 bp, Homo Sapiens
acttggctaccaacaatccctccaaatgtgmacactgtctgataacactattttacatcag

SEQ ID NO: 3951 - DNA, 61 bp, Homo Sapiens
acacagaagacattcaacctttgctgcccaygacactgggtttcttccttcaatccacatc

SEQ ID NO: 3952 - DNA, 61 bp, Homo Sapiens
gaggggttggtatgggaccacacagttgatrgaacatccgggacagggacaattagcaccg

SEQ ID NO: 3953 - DNA, 61 bp, Homo Sapiens
ccccttcttttccacatgctacagattccakatcttggtctagatacagtcaccctggctg

SEQ ID NO: 3954 - DNA, 61 bp, Homo Sapiens
acacctacattgagggtataaaatggtctgrcttttcaagattaagggagaagatttgtga

SEQ ID NO: 3955 - DNA, 61 bp, Homo Sapiens
tgagggttgtcacctctctctctctgtcccyggttatgccatcatttagagattcctgaac

SEQ ID NO: 3956 - DNA, 61 bp, Homo Sapiens
atgaatagaagagtttcctaaagcaacactrtttcctggaggagcgtggatggtggacagt

SEQ ID NO: 3957 - DNA, 61 bp, Homo Sapiens
taccacggcatacacttgagaccacacaccrtaaggattgaaactctctcaaagccacaat

SEQ ID NO: 3958 - DNA, 61 bp, Homo Sapiens
tatatattgctatttgttatgagacttgaayagcgtaaacctgaatggccccaaactaaat

SEQ ID NO: 3959 - DNA, 61 bp, Homo Sapiens
ctttcataaacctgtctctagagaagcaagycattttctactttttccagaagcatttgaa

SEQ ID NO: 3960 - DNA, 61 bp, Homo Sapiens
aggcaattgttttggtatttctacccctctyatcaaaacaagttataaccaaagtacatgg

SEQ ID NO: 3961 - DNA, 61 bp, Homo Sapiens
aattgtgaaatacacaaatattggcctgttyccttgcgatcataaaatttgcaacgtaata

SEQ ID NO: 3962 - DNA, 61 bp, Homo Sapiens
agatcctttggaagtcatgagcatctaagtyggtgagctaaacattaggatattaaccaga

SEQ ID NO: 3963 - DNA, 61 bp, Homo Sapiens
gttgctttcagtgaccttcctggcactcctkccctccagagctctcagtctgctccctaca

SEQ ID NO: 3964 - DNA, 61 bp, Homo Sapiens
taatattcactataagtaacataatgaatcytcatgtgcccaaaacccattttcttttttt

SEQ ID NO: 3965 - DNA, 61 bp, Homo Sapiens
gtgtgatttctctataaatgatttgtataayggtttgggaaacacataaatgttaggggtg

SEQ ID NO: 3966 - DNA, 61 bp, Homo Sapiens
ttatataacagctcaggaccaagaagttagygttgaatggttatgttcacatgtggtccaa

SEQ ID NO: 3967 - DNA, 61 bp, Homo Sapiens
ggaaaggcagagtatcagtacaaataccagygaggcaaggcaggaaaggtgaagtggcagg

SEQ ID NO: 3968 - DNA, 61 bp, Homo Sapiens
attaggctccacctgcaacactggagatcarctttcatctggagatttggaagtgacaaat

SEQ ID NO: 3969 - DNA, 61 bp, Homo Sapiens
gggggtttgctctgtcaagaaggctttgccraaatagagaaagctaaaactcctgttaaca

SEQ ID NO: 3970 - DNA, 61 bp, Homo Sapiens
aattgctcctttcatttatttctgaaggtaycaaagcagagagagtttcttttaaatgaag

SEQ ID NO: 3971 - DNA, 61 bp, Homo Sapiens
tttctattcttatggatccttgtgattgcaytggacccatgcagatgatccaggataattt

SEQ ID NO: 3972 - DNA, 61 bp, Homo Sapiens
ataattcctgtattattttttggaaattatscattctgacagaaaagagcctgggtggaga

SEQ ID NO: 3973 - DNA, 61 bp, Homo Sapiens
caccttaaaatcctctgtatcttggaaatgyatgtcagattggcaaaaatttaaggtattt

SEQ ID NO: 3974 - DNA, 61 bp, Homo Sapiens
cctccagtttcctcccatcactttctacaaytttagtaccagtattgataaccagttcaat

SEQ ID NO: 3975 - DNA, 61 bp, Homo Sapiens
actatctggtttcctttggcctatcactaaycttgatcagttttctgagctagaaactttt

SEQ ID NO: 3976 - DNA, 61 bp, Homo Sapiens
attatatgaataaatataaatatctacatgygtatatggatatggaaaatatctgcgtgta

SEQ ID NO: 3977 - DNA, 61 bp, Homo Sapiens
tgtctgtgcaaggacaaggaaaagaatttcyctactggctcctgccccctctagttcaggg

SEQ ID NO: 3978 - DNA, 61 bp, Homo Sapiens
tccaagatacaaaactctccaggttttcctyttctacctctagctccaccttcttattcca

SEQ ID NO: 3979 - DNA, 61 bp, Homo Sapiens
cactgaatttgtcaacttgggtaccactgaygacaatatccagagcagttttggcaaggca

SEQ ID NO: 3980 - DNA, 61 bp, Homo Sapiens
gaaaagtggagtcctagtaagagtgctttasactttaggaaaatcttcaacaaatatgagt

SEQ ID NO: 3981 - DNA, 61 bp, Homo Sapiens
ttcccctggtgactggcggctgtcttccccrcagggtgcttgaaagagttctgcaagtgct

SEQ ID NO: 3982 - DNA, 61 bp, Homo Sapiens
tcccagggctgctacatacactctcaacccrgattcctcctttacacgatgggcctaaaga

SEQ ID NO: 3983 - DNA, 61 bp, Homo Sapiens
ggaggcggcagcagcaaagtcccaagaacamagtgctggtgtaggagtcaggcccgcatct

SEQ ID NO: 3984 - DNA, 61 bp, Homo Sapiens
ctgaaaggttcttcaaagtcaggtccctaasaaagctgttccatctccagctcagcgtgtt

SEQ ID NO: 3985 - DNA, 61 bp, Homo Sapiens
gccccagaagagaagaggcttctttctcacygtgaggcagaaacaaatttatctgtatgta

SEQ ID NO: 3986 - DNA, 61 bp, Homo Sapiens
aagcagcctccctctgttactactataaacrcccattctgcaggcagtgtgagggcacagc

SEQ ID NO: 3987 - DNA, 61 bp, Homo Sapiens
cagaatgaggaacaatctatgtaaagcaccyggtacagcctaagtgttcaatgaaaagtgg

SEQ ID NO: 3988 - DNA, 61 bp, Homo Sapiens
tatgtgaaagtgcttgtttctctaccccacmactgtaccaccagaggggactgttaaactt

SEQ ID NO: 3989 - DNA, 61 bp, Homo Sapiens
atgagaatgtgaatcttatttacatcttccratttagcaagcctccactgacacagcactg

SEQ ID NO: 3990 - DNA, 61 bp, Homo Sapiens
agaaaaatatccatgatgtctaaggaatttytggagactgtacaaattactgtgaagttta

SEQ ID NO: 3991 - DNA, 61 bp, Homo Sapiens
agctcttcctgcaagttggtttgtggtactstggaggcctggctaagagctgcaccttcat

SEQ ID NO: 3992 - DNA, 61 bp, Homo Sapiens
tttgcaacttatgttttttgtaacagaaagmatctgcatccatttcaaagccacacctaga

SEQ ID NO: 3993 - DNA, 61 bp, Homo Sapiens
gtttcacacacattgcttaatttcatgcttmtgtgagttaaggcaggttttacagtgacac

SEQ ID NO: 3994 - DNA, 61 bp, Homo Sapiens
tttagagtccataaaacagacctggaacgartgttagaagcaaatgatggctcaggaatgt

SEQ ID NO: 3995 - DNA, 61 bp, Homo Sapiens
gaactattaatggaaaacctcaaaatagtaygttgaacattttttatgaggacaactgtat

SEQ ID NO: 3996 - DNA, 61 bp, Homo Sapiens
agtctttcatagacatgttcagtttgaaacrctttttggatttccaagtggagatgccaaa

SEQ ID NO: 3997 - DNA, 61 bp, Homo Sapiens
agacatgttcagtttgaaacactttttggayttccaagtggagatgccaaagctaggagtt

SEQ ID NO: 3998 - DNA, 61 bp, Homo Sapiens
agaatcccagctcagatccagcagaagacayggcatgcgagatcttgaaagatcccttttg

SEQ ID NO: 3999 - DNA, 61 bp, Homo Sapiens
tgtggtagtatcgcagtgcttgtgtcgaagycactcttattttacctaataatggccccaa

SEQ ID NO: 4000 - DNA, 61 bp, Homo Sapiens
attccttgcagaagaaacaaacaaaagagayagaataagcactgcagaaaatagaaaggtt

SEQ ID NO: 4001 - DNA, 61 bp, Homo Sapiens
ttcacctccctggagaagtcctgagcgccaygatcccttccttgagaatcatacaatactg

SEQ ID NO: 4002 - DNA, 61 bp, Homo Sapiens
ctcggcaaccactgggggggccatgctatcraagatcagcctgagtgtttattactggacg

SEQ ID NO: 4003 - DNA, 61 bp, Homo Sapiens
gtctcttatgcttctggggagaaatcaccawctggcgagggtttcctggcctttgggggtc

SEQ ID NO: 4004 - DNA, 61 bp, Homo Sapiens
tgaggtcattaacaagctagtgatcaagagratatgagttaacatctatgtttttcagttt

SEQ ID NO: 4005 - DNA, 61 bp, Homo Sapiens
actaacctgtggtcactgctcctgagacacytgtacggatgtgtgcacggccacatcccaa

SEQ ID NO: 4006 - DNA, 61 bp, Homo Sapiens
aacagcagtaccattctaagcgtcctgtaarcactcttgtcacttctgttgttccaaaaca

SEQ ID NO: 4007 - DNA, 61 bp, Homo Sapiens
attaatacctgacctcacagagtatgatctsagggcacttccgtaaggcaagtccttttag

SEQ ID NO: 4008 - DNA, 61 bp, Homo Sapiens
atgcacatgaggtgagatggagtcaggggcragagggcaagacaggagggaaaggagagaa

SEQ ID NO: 4009 - DNA, 61 bp, Homo Sapiens
gagcccttctattccttccactttgaccagkttttgcctctcttggtggtgggtcccttag

SEQ ID NO: 4010 - DNA, 61 bp, Homo Sapiens
cagaagcaatgccaacaaagtcagaatgaaygaactatagttgacccttgaacaacactgg

SEQ ID NO: 4011 - DNA, 61 bp, Homo Sapiens
tacggttgatgggaagccttactgatcacayaaacagttgataaacacgcacaatggaatc

SEQ ID NO: 4012 - DNA, 61 bp, Homo Sapiens
aatgaattcctgggctcacccataacaaagsctttgagaggcaaactctgcaacagactgc

SEQ ID NO: 4013 - DNA, 61 bp, Homo Sapiens
gttagaaaaggagggaagttacaattgcacrggggtagcatggcagactttctggggatga

SEQ ID NO: 4014 - DNA, 61 bp, Homo Sapiens
cctgctccattcaagaagcctgaaagccggygcaagaagttttgagtgggaacttctgcga

SEQ ID NO: 4015 - DNA, 61 bp, Homo Sapiens
aaacccgaatgcggagggtgaggtccttctmacagcagctgccaggaatgtgagtgtctgc

SEQ ID NO: 4016 - DNA, 61 bp, Homo Sapiens
tgtttctgcttattctccaacctagttgacrccagagggaggcatcaaaaaaagattcgga

SEQ ID NO: 4017 - DNA, 61 bp, Homo Sapiens
cagcgcctctcacctgacagcttaagagaaygttcacatatatttacatatatatttcaga

SEQ ID NO: 4018 - DNA, 61 bp, Homo Sapiens
attttagaaaggaatctgaatcaaggatttktggtatggcttccaagttttaggacaaagc

SEQ ID NO: 4019 - DNA, 61 bp, Homo Sapiens
tgctgaaaatgcatttcttccattaattgcrctcatggctttggtctgcattgactcagga

SEQ ID NO: 4020 - DNA, 61 bp, Homo Sapiens
tgtctcaagaaattccccctattaaaatgcygaaatgcaaagttgttagctcagcaggtac

SEQ ID NO: 4021 - DNA, 61 bp, Homo Sapiens
ctgactgtgttgggagataaggctggaaaamtggggagcaaatcaagacaatctggcctta

SEQ ID NO: 4022 - DNA, 61 bp, Homo Sapiens
tcaactcataaaagcagtagagataccaaakagaatcacgacgtgaaggaacactagtcag

SEQ ID NO: 4023 - DNA, 61 bp, Homo Sapiens
ataacataaccagaatgagaactcaggttgyctcgtttctagtccactgctttttttcttt

SEQ ID NO: 4024 - DNA, 61 bp, Homo Sapiens
taaacaaaatcctcttgttggacagataatmaaaacaaaataccttagacctacatttctg

SEQ ID NO: 4025 - DNA, 61 bp, Homo Sapiens
tccctgcaaagtgtgctacgctattgtagayatttaagcggtcaatgcaatttaagacaag

SEQ ID NO: 4026 - DNA, 61 bp, Homo Sapiens
gaacaagcctaattccacaacaaaactggawgtggctgcttggatcacctccgtccaaccc

SEQ ID NO: 4027 - DNA, 61 bp, Homo Sapiens
gtccagggagaaaataatgaggttgagtaakggagagaagggaatccctcagaaggacact

SEQ ID NO: 4028 - DNA, 61 bp, Homo Sapiens
tcttgtctatataactacattatgtacacargactgttggtatataggggaaagagtgtac

SEQ ID NO: 4029 - DNA, 61 bp, Homo Sapiens
atccccattaccagcaccaccaggaatatcygcctcttcccggacgagtccaagaggcatg

SEQ ID NO: 4030 - DNA, 61 bp, Homo Sapiens
ctttcgtatgtatttgtgaataacagaagayacaatgacatggtgatggtaacacatgttg

SEQ ID NO: 4031 - DNA, 61 bp, Homo Sapiens
gcccttactgccctttatatcgacctttcawctttgtcagaatatctctgaagggaacaaa

SEQ ID NO: 4032 - DNA, 61 bp, Homo Sapiens
gtgagaatttcatggcccagatcataaggcrgagggctttaaagttctcttcaaatcgcac

SEQ ID NO: 4033 - DNA, 61 bp, Homo Sapiens
gtctccaatcttaatgccatgcccttggggstgtatctaggaagtggcagctccctgcatt

SEQ ID NO: 4034 - DNA, 61 bp, Homo Sapiens
aaaaggaatggactgtgtgttctatcagtayaaaaaatggaaaatgtaccatcaaaataag

SEQ ID NO: 4035 - DNA, 61 bp, Homo Sapiens
ggggaagatggcagcaagaatgggaatgctkttcccaacaagggagaagaagaggctcctg

SEQ ID NO: 4036 - DNA, 61 bp, Homo Sapiens
gatgagcaccgctctacaacttgatattackactgttctctagagtcatccaaaacacggc

SEQ ID NO: 4037 - DNA, 61 bp, Homo Sapiens
atgagaacaagtttgtcaccatattcagagscattttaaagtgtgtgccttactgattgct

SEQ ID NO: 4038 - DNA, 61 bp, Homo Sapiens
ttaccacttggctttgtcttgtctaggtacstgaatggagtggtgaaaaatggagctgccc

SEQ ID NO: 4039 - DNA, 61 bp, Homo Sapiens
ttggattttatatcactttgttgcattctasttttacccttctggtgatgttttacttaga

SEQ ID NO: 4040 - DNA, 61 bp, Homo Sapiens
atcctgaaataattatgctgagtaaaaaagsctagacaaaaagaagtacatgctgcatagt

SEQ ID NO: 4041 - DNA, 61 bp, Homo Sapiens
atgtggttcttgagtatgtccagaattatawggctgttaatgtgtcttgagccctgaccta

SEQ ID NO: 4042 - DNA, 61 bp, Homo Sapiens
aagtgcctgtcagagtacctggcactttagyaggggctcagtaaagagtagggaggaagtg

SEQ ID NO: 4043 - DNA, 61 bp, Homo Sapiens
gtggaggaggatcactggtagccgtgtaagwggtgctaagtttggacaactaggcagttaa

SEQ ID NO: 4044 - DNA, 61 bp, Homo Sapiens
ttagacaatataaacatcagccccagaaagkagacacggaatgacaacttatttttattgc

SEQ ID NO: 4045 - DNA, 61 bp, Homo Sapiens
tgaaaacccagttagggagttatctgttctyggatgcctatgagaaagaatgtgtgtctac

SEQ ID NO: 4046 - DNA, 61 bp, Homo Sapiens
tgtgtctacacagtatttcatctacaatttrttgtctacagaaaccattgacacacataca

SEQ ID NO: 4047 - DNA, 61 bp, Homo Sapiens
agctctcacatgtggtctgggtgatgctagytgctttgtgtccttgtgccgcagttgtctc

SEQ ID NO: 4048 - DNA, 61 bp, Homo Sapiens
caaaagacttgtcttaaaaagactcaaaagrttccatggatattaaatgggccttataaaa

SEQ ID NO: 4049 - DNA, 61 bp, Homo Sapiens
ctaactttaaatgtaaacatatactgttcaygtatgctcatcatatatacgcacatctttc

SEQ ID NO: 4050 - DNA, 61 bp, Homo Sapiens
tgtagacatttttacgaacaaaatcttacartgatagtcttgttaccaggatcaaacagaa

SEQ ID NO: 4051 - DNA, 61 bp, Homo Sapiens
ggaaaatggaaaactcgcagcaatcttttcraattcttcctgagaaatgtatccatcctgg

SEQ ID NO: 4052 - DNA, 61 bp, Homo Sapiens
cccaccatgttgtttccttctttcatcctcmggtatggtaatctagaatcaataatttgtt

SEQ ID NO: 4053 - DNA, 61 bp, Homo Sapiens
aaaggagagccatgggaccatgtttaactaygttggcagagtcagggtttggaaaaatgca

SEQ ID NO: 4054 - DNA, 61 bp, Homo Sapiens
aacacttgatgaataaggagacgtaatagaktgatgagacagaaaagcatgcctcgtgaag

SEQ ID NO: 4055 - DNA, 61 bp, Homo Sapiens
gccagactagctgggaaaagtattagagtcwtggtagttcaaaggtgttttttaaagagga

SEQ ID NO: 4056 - DNA, 61 bp, Homo Sapiens
attatgtggcttgggctgcattttgctttcrtcacttaacaccatgccaaggctgtctttc

SEQ ID NO: 4057 - DNA, 61 bp, Homo Sapiens
tgagcagagccgctcacacaacaaggacttrtgccgctgaaggcccgtggcagaatgaacg

SEQ ID NO: 4058 - DNA, 61 bp, Homo Sapiens
tattttggcctcagagagaaaaactataatyctgtgacttcttgggaaatgctaattgaat

SEQ ID NO: 4059 - DNA, 61 bp, Homo Sapiens
gggtcaggagctgagaaacagttttctaaayacccagttggcacacatcatggcatttgac

SEQ ID NO: 4060 - DNA, 61 bp, Homo Sapiens
agtacgtgttcgccatctggtggtaaagtcrtggagacacaggctgtactgaccctagaga

SEQ ID NO: 4061 - DNA, 61 bp, Homo Sapiens
tattgaaagcatatcctcaaacacctatttstcccaaaagtccccacgcctgtcaaaatag

SEQ ID NO: 4062 - DNA, 61 bp, Homo Sapiens
gcagaagagccaaaggccctcggcagccaarcatgttcaacggccagtgcccaggtcacca

SEQ ID NO: 4063 - DNA, 61 bp, Homo Sapiens
agggtcacctgggtagacactgcccaaggcrgccgctgagccttccccacaagaattgctg

SEQ ID NO: 4064 - DNA, 61 bp, Homo Sapiens
cgtagtaattgagtcttataaattgtacctyctaatagctctaaccaagtttagtcctcac

SEQ ID NO: 4065 - DNA, 61 bp, Homo Sapiens
actagcaaatgaatgaggctcaaactccttwtagcttaacatttaaaactctaatctctcc

SEQ ID NO: 4066 - DNA, 61 bp, Homo Sapiens
tatgtaagtattagattgaatgcagtaactrtattgcaggtatacagaagaatacttttat

SEQ ID NO: 4067 - DNA, 61 bp, Homo Sapiens
aaaggagaaaacctgttttctgtctttaackgtccttcccctcaactgggaccctgtgctc

SEQ ID NO: 4068 - DNA, 61 bp, Homo Sapiens
gtgacagtcatcctcctgagagagtcccccrtcttctagacaggactggcccgtgctaacc

SEQ ID NO: 4069 - DNA, 61 bp, Homo Sapiens
gttttgcaaagtgttagaagtgaatttctgstgaggaacctcggagtgtgaggcagggtga

SEQ ID NO: 4070 - DNA, 61 bp, Homo Sapiens
gagcagcgcacggggcttcatgtgcccactycaggcctccccagccgaacatagatgggaa

SEQ ID NO: 4071 - DNA, 61 bp, Homo Sapiens
ttgtgccttacaattatttgtcagttttagrgctaacaacatagtaaggctcaaaatataa

SEQ ID NO: 4072 - DNA, 61 bp, Homo Sapiens
ttctaattgctgacggtgtggtagaagttartaaaacttagtatctccgtgttacctgtga

SEQ ID NO: 4073 - DNA, 61 bp, Homo Sapiens
tcaaattcattagtcttgttttctggctacrtcaatcttactttaagactttctcttttaa

SEQ ID NO: 4074 - DNA, 61 bp, Homo Sapiens
ggaggggagcatctgtctgccactgagaccwatcacagcctctttgcacagcatgccagct

SEQ ID NO: 4075 - DNA, 61 bp, Homo Sapiens
ttgcacagcatgccagctcctcagtgttacrttcctcgccagggtctctcagtgggtcttc

SEQ ID NO: 4076 - DNA, 61 bp, Homo Sapiens
agtccttcatatatttatgtgatgccaaacktgtctgtttttccttgtgctttgctagctc

SEQ ID NO: 4077 - DNA, 61 bp, Homo Sapiens
ttactgatctttacacacatttcctaacacrtgaaagcgggtaatgccacctacctcacag

SEQ ID NO: 4078 - DNA, 61 bp, Homo Sapiens
cagaagcatgggggtgagaaggaagaaatakctctggatcagtgtgggccaaaagttaatt

SEQ ID NO: 4079 - DNA, 61 bp, Homo Sapiens
aacatctaggcatgtgtgcaagaaattcttytatcactggcttctataattgagcaaggtt

SEQ ID NO: 4080 - DNA, 61 bp, Homo Sapiens
tcagtcacatagccccagatgggctgcttargattgggaaaagaaagctgggttagaaagt

SEQ ID NO: 4081 - DNA, 61 bp, Homo Sapiens
ttgagaacagcgaaaccgtgcctccttctckaattagtcactttaagtatcagtgatgggc

SEQ ID NO: 4082 - DNA, 61 bp, Homo Sapiens
ctgtgtgaatagtatgtcctttagctcaggragtcattctttccactgtgctctgtgcacg

SEQ ID NO: 4083 - DNA, 61 bp, Homo Sapiens
gccatgacatgtctctgtcctaacatggatstgcccagtatcgccttggtaccccagccct

SEQ ID NO: 4084 - DNA, 61 bp, Homo Sapiens
tcttctaggtcccaggaggtagtctttggcstggtgtgactgtgactgtgtcctccagctc

SEQ ID NO: 4085 - DNA, 61 bp, Homo Sapiens
ccacgctgagtcgtacaggcatttacatagraacttggagcaaatggacacttcctctcag

SEQ ID NO: 4086 - DNA, 61 bp, Homo Sapiens
ctcccactaatcatcatgtgagattcagacyctttaaggatgtagatgctaaagggaaggc

SEQ ID NO: 4087 - DNA, 61 bp, Homo Sapiens
cagaatttatttcctgatgtctcccagaatracatccttgtggcacctgatctaatccata

SEQ ID NO: 4088 - DNA, 61 bp, Homo Sapiens
gcaggtgagagtattcctgggaccacccccmatttctgcttcgagaaagaggcctgcgtcc

SEQ ID NO: 4089 - DNA, 61 bp, Homo Sapiens
cccagtgaaacattagtggagttggttaaasacacgaagccggagctcactctagcatgtg

SEQ ID NO: 4090 - DNA, 61 bp, Homo Sapiens
ctgcgtcacactgaggagtcaagacgctatyctgtcagccaggggctttcctagccagggg

SEQ ID NO: 4091 - DNA, 61 bp, Homo Sapiens
aaacatgcaggaataaggtctgggaagatgyttcaagttctgttcaaaaaagtatatcagg

SEQ ID NO: 4092 - DNA, 61 bp, Homo Sapiens
aggctggtgtgtgaggttcctaatctcccartcacagaagaaattatgttcaagacagctc

SEQ ID NO: 4093 - DNA, 61 bp, Homo Sapiens
gacacagcttaggtatgaaaatctggcaaaycaatagtcccccaaatgtgttcttatgatg

SEQ ID NO: 4094 - DNA, 61 bp, Homo Sapiens
atcacagaatagcagttcagtaaattcacargcaaacatactgatgctaaagcatgatgaa

SEQ ID NO: 4095 - DNA, 61 bp, Homo Sapiens
aacagcatagtgacagatatggcagagtgcrcaaaacctaaaatagtatgtggccctttac

SEQ ID NO: 4096 - DNA, 61 bp, Homo Sapiens
gtgatgacatgtaaatgattaccgcttaaartagcacctagtatttatcagtgctttatag

SEQ ID NO: 4097 - DNA, 61 bp, Homo Sapiens
gctgttgtggactcttgggatatcatttttsctcatcattacctcaaaattacagtaatta

SEQ ID NO: 4098 - DNA, 61 bp, Homo Sapiens
catcatcaaattaatagctaatcctagtcaytatgttattccacacactgttctaaggatt

SEQ ID NO: 4099 - DNA, 61 bp, Homo Sapiens
taactatctcatgaccgtgtctgtgagtccrtttttatacagtcaaggttcaaacccaggc

SEQ ID NO: 4100 - DNA, 61 bp, Homo Sapiens
agctccagtgcttggagcctcctaagagctyggactcaaaatcccttatcaaggggcttcc

SEQ ID NO: 4101 - DNA, 61 bp, Homo Sapiens
ggttcagatggggcgcgtggaggggtcaagkccaggaactgatgcaggagagggtgcaggg

SEQ ID NO: 4102 - DNA, 61 bp, Homo Sapiens
aaaggccatagtttttaggcccttgctctaraatgtttactgaatctgagtgacagaccct

SEQ ID NO: 4103 - DNA, 61 bp, Homo Sapiens
cagacacaaaaggccacatcttacaggtttyacttacatacaatgttcagaacatgtagat

SEQ ID NO: 4104 - DNA, 61 bp, Homo Sapiens
tacagtgttgcctagagttgagaacctagawattgggaggctgtagctgttggactcttgc

SEQ ID NO: 4105 - DNA, 61 bp, Homo Sapiens
taatctagcagggaaaattttcacattggarttgagggatctcttagacttcaccgtctgc

SEQ ID NO: 4106 - DNA, 61 bp, Homo Sapiens
tcctcttggttctactttcaaaatacaaccrtttgcttttctccatctctgctactatcac

SEQ ID NO: 4107 - DNA, 61 bp, Homo Sapiens
tgttgatggtccctgtcatggtgcatgtgcrtttaccttttctcctacccaggtttatagc

SEQ ID NO: 4108 - DNA, 61 bp, Homo Sapiens
tcttaaataaataaataaataaataaagtaycatagacctagacatacaggctaaaacctt

SEQ ID NO: 4109 - DNA, 61 bp, Homo Sapiens
gaagatgtcagtgctgtggttctgaaggtgracaactttgtggtaacagccaacctgctag

SEQ ID NO: 4110 - DNA, 61 bp, Homo Sapiens
ggactagcaagtccagcctcaccgtgtatcrccaaattgctctccaaacgataccaatctc

SEQ ID NO: 4111 - DNA, 61 bp, Homo Sapiens
cagtgagtgcagccaggctgctgtttgcagracttaactctcatcccaccagctgtggctg

SEQ ID NO: 4112 - DNA, 61 bp, Homo Sapiens
aacatcaaaagggattacatgagaacaaagkaattatccttcgtgtatgagtatcaaccca

SEQ ID NO: 4113 - DNA, 61 bp, Homo Sapiens
aggttggcctagtgctagatggcaggcattraaaactgtcaacaccagtacaggaacagga

SEQ ID NO: 4114 - DNA, 61 bp, Homo Sapiens
gataaatctctagtatcctcaagagtctttsaatactttcctgtctccagcaaatctcgtg

SEQ ID NO: 4115 - DNA, 61 bp, Homo Sapiens
ctgtatccattcagtagccaatgtaaaatgrtgccaaacttactattttagattgaaggga

SEQ ID NO: 4116 - DNA, 61 bp, Homo Sapiens
gtgcagggatcagacagtgaataggtaagtsagtgatctgccgagaaagatgacaacagtg

SEQ ID NO: 4117 - DNA, 61 bp, Homo Sapiens
acaacgcagcttgtttttgcataatttaagyactacgtggttgtgtcgtttaagttctgtg

SEQ ID NO: 4118 - DNA, 61 bp, Homo Sapiens
ttgtggagtcagtaagatgatggtaaacagsgagatgcatctcacaaatacccgtacccag

SEQ ID NO: 4119 - DNA, 61 bp, Homo Sapiens
tgtgccatggtggtttactgtgcctgtcaasctgtcatcaacgtattaagcccagcataca

SEQ ID NO: 4120 - DNA, 61 bp, Homo Sapiens
tggaacaaaaaacgaataggtaatatttaayggaagaactattgttcatatcataaacgca

SEQ ID NO: 4121 - DNA, 61 bp, Homo Sapiens
aactccatcttaaacataaaataaaataatyctggatcctcctgtactacctgtgtgacct

SEQ ID NO: 4122 - DNA, 61 bp, Homo Sapiens
agaaaagtgactctcgcaatttattgccaaygagaaccaccacattgttcattgattgcat

SEQ ID NO: 4123 - DNA, 61 bp, Homo Sapiens
agtctggggaatacatgtatagtttgcattstggacatccgattgtttccctggatgctgc

SEQ ID NO: 4124 - DNA, 61 bp, Homo Sapiens
ctctagtttattgtgcctaatggagtcttaytaagggcaaagctaatagacaacaaggttt

SEQ ID NO: 4125 - DNA, 61 bp, Homo Sapiens
tcgtgtcctggatagtatgaagcatttaacsatgaagtcttctgttgcaaatgacatgtgt

SEQ ID NO: 4126 - DNA, 61 bp, Homo Sapiens
cagtgaacctagtctttgctgaggacaagayatgttgacaaacccaggcacaaggactgtc

SEQ ID NO: 4127 - DNA, 61 bp, Homo Sapiens
agggctcgagttagattcagtattcaaccartgttgctgcttaagcctgtaaatgtatggt

SEQ ID NO: 4128 - DNA, 61 bp, Homo Sapiens
gccgggctttgcatgccatcgtccttcagtraacagttgtgaaactgaacgaaattgcctt

SEQ ID NO: 4129 - DNA, 61 bp, Homo Sapiens
ttctagtctcctgatgattcctgagaacatygaaattctggggcttctcagggcccatgca

SEQ ID NO: 4130 - DNA, 61 bp, Homo Sapiens
ctcagcatgtgcctgggcagttagcaaggaktaaacaaaggaaagttggtaatattactgc

SEQ ID NO: 4131 - DNA, 61 bp, Homo Sapiens
atccccatctagatgaagagacaagtagaarggagatgcaggcatttctattttcagagta

SEQ ID NO: 4132 - DNA, 61 bp, Homo Sapiens
cagtgatagccagaatcctttgtcttaactyaggataggggagaagcaaaagccttcctca

SEQ ID NO: 4133 - DNA, 61 bp, Homo Sapiens
agctggactagtgatgaaactagagttttaytgcagagctacctagccataaatattcctt

SEQ ID NO: 4134 - DNA, 61 bp, Homo Sapiens
gatcttgacttaaatttgatcaagatacagsaattgggtggttagttttgcttgcacaatg

SEQ ID NO: 4135 - DNA, 61 bp, Homo Sapiens
aacagatgatttctaagaggcttttactagytctgatattaacttagttattccacctgga

SEQ ID NO: 4136 - DNA, 61 bp, Homo Sapiens
acccatatagaatagactaaggaactaccatycaggagtggtccaccagtccagtcactgg

SEQ ID NO: 4137 - DNA, 61 bp, Homo Sapiens
aggggaactttctcctttgggaacaccagastcgttgctcagagtaaatcccagtgtgctc

SEQ ID NO: 4138 - DNA, 61 bp, Homo Sapiens
aattgccaatacttttagaaaaaggaaatcrttaagtgccaccttgtagccattaaaacca

SEQ ID NO: 4139 - DNA, 61 bp, Homo Sapiens
tgaccagttaggaaaagaatcttccatatascctatccccctgcttgggtgggtgaggcga

SEQ ID NO: 4140 - DNA, 61 bp, Homo Sapiens
atgggtgtgaaagtgctcggcaaactgtaamacaaggtacacccatattaagggtgtgttg

SEQ ID NO: 4141 - DNA, 61 bp, Homo Sapiens
gcatgtaaaatggtcagcacagttattacayggaactaaatttctttttatttaacaagca

SEQ ID NO: 4142 - DNA, 61 bp, Homo Sapiens
atggaagggcccttcactctctgtcttaagwatttctgtggtttttacttaaaaagtaata

SEQ ID NO: 4143 - DNA, 61 bp, Homo Sapiens
tagctagagattcagaaggatttaattctcygaagcaatgtgatagttccaatattagtca

SEQ ID NO: 4144 - DNA, 61 bp, Homo Sapiens
aggagagaataagatgatactgacaatctcytgagttgtgacagtatgccaggcactgtgc

SEQ ID NO: 4145 - DNA, 61 bp, Homo Sapiens
ctctcgcgatcagcagcagtaaacacactargaacgcactattaaaatgaagagtgcctac

SEQ ID NO: 4146 - DNA, 61 bp, Homo Sapiens
acagtcagggctgggaaaacgtcctctgagwtgcactgtccctcccccatcatcctgcccc

SEQ ID NO: 4147 - DNA, 61 bp, Homo Sapiens
gatgtagcgcttcgccacgtagttggaggckcccttccactgctgggcatgcaagaagttg

SEQ ID NO: 4148 - DNA, 61 bp, Homo Sapiens
gactagaattttaagaggcaaaggatacttyatgtagcagtcagctgtttacatgaaccat

SEQ ID NO: 4149 - DNA, 61 bp, Homo Sapiens
ttgaatgctcacaagggtcccacaaaatccrtactattggctgggcatggtggctcacgca

SEQ ID NO: 4150 - DNA, 61 bp, Homo Sapiens
cttatctgagttcctttcttagaaaactgaygctcgggcctcccagagagtataaaggaac

SEQ ID NO: 4151 - DNA, 61 bp, Homo Sapiens
ctgtccccatccaggccctttcttttggagygttctcagtataacccaacaggtggacaca

SEQ ID NO: 4152 - DNA, 61 bp, Homo Sapiens
aggaataaaaaactcgccaaaatttcctaasttgtagaatagaaatagtcacctccaaaga

SEQ ID NO: 4153 - DNA, 61 bp, Homo Sapiens
atattgattgtctcacacagtttctgaaccrcaggaattcaggatggcttagtaggatggt

SEQ ID NO: 4154 - DNA, 61 bp, Homo Sapiens
agaggtcaactggctctatctggtggttcarggaagactttctagaaggggtgatgcctga

SEQ ID NO: 4155 - DNA, 61 bp, Homo Sapiens
aatggctgttcagatttgcattttaagtagyttactctgatcaagttgccaagtgagacaa

SEQ ID NO: 4156 - DNA, 61 bp, Homo Sapiens
ggcgtgagccactgcgcctagccaggagtaytttttagtagcagtcctagatagcttcact

SEQ ID NO: 4157 - DNA, 61 bp, Homo Sapiens
aattccctaatttctcattataaaacaattkgatttcatctcgcaggctctaattgcattg

SEQ ID NO: 4158 - DNA, 61 bp, Homo Sapiens
tcttgcgggcatgagtctggtctcagtaatmacattgtccagcccatcataaagggctctt

SEQ ID NO: 4159 - DNA, 61 bp, Homo Sapiens
attgcatccttgagttgcatatgatgggatmtcttgaatcatttacattttgaaaaaagaa

SEQ ID NO: 4160 - DNA, 61 bp, Homo Sapiens
gtagattgggcagatctggatttcaccacayctggtttttgttgtcattgagtttttgtga

SEQ ID NO: 4161 - DNA, 61 bp, Homo Sapiens
tcagaaattttcctttttgtggcagaatcaygatacgttgtatgggtattccacagtttat

SEQ ID NO: 4162 - DNA, 61 bp, Homo Sapiens
tcctacggctgagaggatgaaatttctgaaygggcactttgccgagtgagtgaccacatcg

SEQ ID NO: 4163 - DNA, 61 bp, Homo Sapiens
aactctcatatattgaggatgggagtctagkagggcatacttgctttggaaaagtttgttt

SEQ ID NO: 4164 - DNA, 61 bp, Homo Sapiens
attttatttataatagaaggaaactgggaamaaccaaatgaccatcaacagataaagggac

SEQ ID NO: 4165 - DNA, 61 bp, Homo Sapiens
gaacaggtctgcagttcaaaccctagagcgsattctgtagtccataggaacagaaaacgag

SEQ ID NO: 4166 - DNA, 61 bp, Homo Sapiens
gtttgaaaagcagtgacctctctgtgcaaaygatttttttttccaaacagagctgaacaag

SEQ ID NO: 4167 - DNA, 61 bp, Homo Sapiens
ttttgagtactttctgtggttagtcaagtcsatatctggaactcactgatatggagtgcca

SEQ ID NO: 4168 - DNA, 61 bp, Homo Sapiens
tattaaatcaaactgcggaaacagccaccartaaaagagcctcagctgggcacagtggcgg

SEQ ID NO: 4169 - DNA, 61 bp, Homo Sapiens
ggcacagaacttgctgttcagctttttctaygaacttgggattccctctcaattgcccaat

SEQ ID NO: 4170 - DNA, 61 bp, Homo Sapiens
cttcctaggtctgctcctataaagaagcacmttctcaagacagcctcatcaacactggaat

SEQ ID NO: 4171 - DNA, 61 bp, Homo Sapiens
ggactacaggcatgagccactgcgaatggcstatctttcaaaacattatgaatgcttcctt

SEQ ID NO: 4172 - DNA, 61 bp, Homo Sapiens
gtggatatgtccttggcattgctgttgtggstagtatagtgactatctctgaggaacagca

SEQ ID NO: 4173 - DNA, 61 bp, Homo Sapiens
gatgtacaggagatggcatatcgatgcaaakgacccaaaaaatagggccagatttaataac

SEQ ID NO: 4174 - DNA, 61 bp, Homo Sapiens
ggcttggcatgtggttattgaatctggttaytgaatgtttggtagtaggccattctgcttg

SEQ ID NO: 4175 - DNA, 61 bp, Homo Sapiens
aaagcctttgttttaattaacttgaggattyttccaatgttctggcttggcatgtggttat

SEQ ID NO: 4176 - DNA, 61 bp, Homo Sapiens
cagtgttttgtaatatataggtacacagcaraactggatcttcaaagccttcaaataggct

SEQ ID NO: 4177 - DNA, 61 bp, Homo Sapiens
ttgacactaaacgacatggctcgccttttayattaattgcaaacacctctcaactgtctca

SEQ ID NO: 4178 - DNA, 61 bp, Homo Sapiens
attttttaattaattataagctttatatttyagagtggcttaagatttacagaaaaaattg

SEQ ID NO: 4179 - DNA, 61 bp, Homo Sapiens
agaaaagaaataaacagaacagtaaacttasctgcaaaagaagtcatccagaatattggag

SEQ ID NO: 4180 - DNA, 61 bp, Homo Sapiens
aggcaggagagaaataataaccttttcataytctttgcccagacttgaggaagcccagggt

SEQ ID NO: 4181 - DNA, 61 bp, Homo Sapiens
agtccagctggggtctcgtttttagctttawgagaaagccatacaggactcattcaaaaaa

SEQ ID NO: 4182 - DNA, 61 bp, Homo Sapiens
tcaaattaatttcccccaaagaactctcatytgccatatattggtcataaatgtgtctaga

SEQ ID NO: 4183 - DNA, 61 bp, Homo Sapiens
acctttccatgcccctggatccttgttcagrtttggcttgatgtacgcactttgaagatac

SEQ ID NO: 4184 - DNA, 61 bp, Homo Sapiens
caaagtaagttcttcacggaactaaatggarttgcttgttcaatgagattctaatttcagt

SEQ ID NO: 4185 - DNA, 61 bp, Homo Sapiens
gcctttggatcaacttttgtaggaagacatktaaaagaaactgagcaggacttgggcacag

SEQ ID NO: 4186 - DNA, 61 bp, Homo Sapiens
acagcccaaattaagagcttggcacccaatycccacttggactacaaatcacttcctcttg

SEQ ID NO: 4187 - DNA, 61 bp, Homo Sapiens
ccatgtctagaagacgtgagaatccttccamccttattctgttggccagtgcttagtcaca

SEQ ID NO: 4188 - DNA, 61 bp, Homo Sapiens
ccaaaccccattatctttccatatggaatgstgtagctggtgttggagtcttctttcacag

SEQ ID NO: 4189 - DNA, 61 bp, Homo Sapiens
gaggtgacaggggcttctgttttcttgagtytccctgtttgctgatgtcatcccctcctac

SEQ ID NO: 4190 - DNA, 61 bp, Homo Sapiens
ctaggttacttggcactttgggcaatcctamtggctacctgtactctttaataaatctctt

SEQ ID NO: 4191 - DNA, 61 bp, Homo Sapiens
taattatatcaaatactcgattccatggttkctggtattggataaatgactaaatttgtaa

SEQ ID NO: 4192 - DNA, 61 bp, Homo Sapiens
attgtatctttatgagcctattgatgtttcmgagaaataaactctggtcattgaatgaaat

SEQ ID NO: 4193 - DNA, 61 bp, Homo Sapiens
atgatgagataagatatttgtttgggaaatygctctgaagaagatggaatgaaggagagag

SEQ ID NO: 4194 - DNA, 61 bp, Homo Sapiens
aacaccagccctgccctattcctctgtgggkgattgtggcgataattctagttccctggaa

SEQ ID NO: 4195 - DNA, 61 bp, Homo Sapiens
tgaggtaaaatgaggaaggagaatcaagacmctggaaacatatgcccaagagggagcctga

SEQ ID NO: 4196 - DNA, 61 bp, Homo Sapiens
tgacttatttctccttccctctattttaaastcttgattctatcatctgcttgcctgcgta

SEQ ID NO: 4197 - DNA, 61 bp, Homo Sapiens
gctgatggaagcagctgatggagtggatgtrtataaggagcattgggcaccctgttagcag

SEQ ID NO: 4198 - DNA, 61 bp, Homo Sapiens
ctttctaaaatttagtgccttaaacaaagasatactgataaatcttttcatgaagtttcgg

SEQ ID NO: 4199 - DNA, 61 bp, Homo Sapiens
acacaggccaggaagacagatgtttgtaggkctatctggagcagcacgcacatgcgcacat

SEQ ID NO: 4200 - DNA, 61 bp, Homo Sapiens
tgtggctactgagcactcaaaacgttcctartttgactggagtactgagttttttcatttt

SEQ ID NO: 4201 - DNA, 61 bp, Homo Sapiens
cttagtgcaaatggcttcctggtttgggtamaaatttagcaactgaatgtgatcttgtgta

SEQ ID NO: 4202 - DNA, 61 bp, Homo Sapiens
agtggctctgtctaaattcaaatccttcctwatctaacccttggggagaaaacagtgtgtg

SEQ ID NO: 4203 - DNA, 61 bp, Homo Sapiens
atcccaagggaatatcgtccctatttagccrtctccctgtctcatctctcagcaccttcac

SEQ ID NO: 4204 - DNA, 61 bp, Homo Sapiens
aagcccgaggaactgagcgtgaagagccctsacgccatgaagacttgaatcactttaaagc

SEQ ID NO: 4205 - DNA, 61 bp, Homo Sapiens
tcccctctgacatgtggcatcaaattgcacrtcagcataaggaatcctggtagattttttt

SEQ ID NO: 4206 - DNA, 61 bp, Homo Sapiens
gaagtgggaaaaacattttactaaacaagtrtcattccacattttaaggaagaaactacta

SEQ ID NO: 4207 - DNA, 61 bp, Homo Sapiens
ccgctcattaaggtggaagttctgtgcttgmtcttaacaccggaaggagaggagtctattt

SEQ ID NO: 4208 - DNA, 61 bp, Homo Sapiens
aaaaaatcaattcagttgacattaaagttgraagtgtactcctcttatccaacaacaacaa

SEQ ID NO: 4209 - DNA, 61 bp, Homo Sapiens
catcagatgcacttagtctgtggtaactggrtatctaaatacacaacagaataaaagtgcc

SEQ ID NO: 4210 - DNA, 61 bp, Homo Sapiens
gtcctggtctgtcgctgactcttgggaactyaggtcaactcttcacctcctggtctgttac

SEQ ID NO: 4211 - DNA, 61 bp, Homo Sapiens
tgtacaagtgttgtccgtctaacctacttamcctttgtaattctattgtgatttgcttggc

SEQ ID NO: 4212 - DNA, 61 bp, Homo Sapiens
tcggtctgtggtgtctggtgtgggacctcayatgaagggggccacacagcacactccctgt

SEQ ID NO: 4213 - DNA, 61 bp, Homo Sapiens
tcactgtgtcaatgcacgtgaaatgcatagracaaagacatgtaaagatatgacctgtgac

SEQ ID NO: 4214 - DNA, 61 bp, Homo Sapiens
cttcgggcttatctgatgttcctacagattmtaaattttctacaaaaacgtccattggtaa

SEQ ID NO: 4215 - DNA, 61 bp, Homo Sapiens
gaaaacaagtataaatccttcatgaccttgratggtttgctagatatgacgccaaaagcac

SEQ ID NO: 4216 - DNA, 61 bp, Homo Sapiens
gctcatgtgcagagaaaatgggatttgccasctgttctcaactcaaggcaggctctgtgtc

SEQ ID NO: 4217 - DNA, 61 bp, Homo Sapiens
caggtcacacaggtgctaagtcgcagaactrgggtctaagcccgagtcctgaggctctcca

SEQ ID NO: 4218 - DNA, 61 bp, Homo Sapiens
agagaaagagaacaatcaaggacgacgctarggtttttagtctaaataactgaaggaatgg

SEQ ID NO: 4219 - DNA, 61 bp, Homo Sapiens
tgctcaataagaacatgtgttattgaattaytgaggtaggtaggaggtggtggagattaaa

SEQ ID NO: 4220 - DNA, 61 bp, Homo Sapiens
agcttcctgggccctctgtgtcctcctctawctatccaaccctttccctggaattttcacc

SEQ ID NO: 4221 - DNA, 61 bp, Homo Sapiens
tgacttaacacatcctaattcaactaacacrtccagtatattcaaatcctccaatatagca

SEQ ID NO: 4222 - DNA, 61 bp, Homo Sapiens
ggcatgagtttcctccagatacagtagttcmagaaagtgcagcagcttcaatgactgatac

SEQ ID NO: 4223 - DNA, 61 bp, Homo Sapiens
aagagggctggggggtcaggactttgtacasacccatgaccttaccatgcttctctgtgtc

SEQ ID NO: 4224 - DNA, 61 bp, Homo Sapiens
agtcctgagaaaaatgccagacaaatcccawccgagaggcattctacaaaatgcctgatta

SEQ ID NO: 4225 - DNA, 61 bp, Homo Sapiens
aggaagaacatggactctggagtctgttackgccagttttggttctagtacgttaaactcc

SEQ ID NO: 4226 - DNA, 61 bp, Homo Sapiens
tggttattaaggcagagatgtgctctatagrcctttgcagtttacagaatgtgtatgtttg

SEQ ID NO: 4227 - DNA, 61 bp, Homo Sapiens
aattgtattggaaggcaggagaagaccatgragagcttggcaggccaaggtagggggtctt

SEQ ID NO: 4228 - DNA, 61 bp, Homo Sapiens
aagcctgaaaaccattggcctttggtgaccrgtaactcagctttcaagctaacagacaagt

SEQ ID NO: 4229 - DNA, 61 bp, Homo Sapiens
tatgggaccaggctgcttgtctcaacagagragaaggctaggcaaaggccatggccaaaaa

SEQ ID NO: 4230 - DNA, 61 bp, Homo Sapiens
cttcctgctgcactctgtgtggtcattgaaygtcacttctgtgcaggatgcagctgattct

SEQ ID NO: 4231 - DNA, 61 bp, Homo Sapiens
gcttcttgccctggaggagatagttccctaytattagaaggccctagacgacttcaccatt

SEQ ID NO: 4232 - DNA, 61 bp, Homo Sapiens
gccttatttgtttacatggattccatgaaaygcaggagctacattttctgttactgctatt

SEQ ID NO: 4233 - DNA, 61 bp, Homo Sapiens
tatatccatatccatggtagagttttgtctrtcaaggagaatggctttaataagatgggcc

SEQ ID NO: 4234 - DNA, 61 bp, Homo Sapiens
acagagaatgtagaggaggcaagatggatarttatggagtcaaagaaaaaaagtccaatgt

SEQ ID NO: 4235 - DNA, 61 bp, Homo Sapiens
gactccgtagacatttccacattccctcatrtaagcatcgcaagaagccagtttgcttatt

SEQ ID NO: 4236 - DNA, 61 bp, Homo Sapiens
ctaccattgatgggtatcgaggttgattccrtataacaaacctactcatgtaccccctgaa

SEQ ID NO: 4237 - DNA, 61 bp, Homo Sapiens
aacatggttttgaggtactgaacggcatacrtaaaacattttcatcagaagggaagtgagg

SEQ ID NO: 4238 - DNA, 61 bp, Homo Sapiens
tgtggatgactggcagccatctgaaacttascatgatccaatgaaactcttgtgttctctc

SEQ ID NO: 4239 - DNA, 61 bp, Homo Sapiens
tattataattaattcaaaaattgtccttctwcctatcaggtcctggctccagactacctgt

SEQ ID NO: 4240 - DNA, 61 bp, Homo Sapiens
tagccttcaattcttaccgaaatcatgtggrtaggcattatttatcatgcctatagaggtg

SEQ ID NO: 4241 - DNA, 61 bp, Homo Sapiens
ggctgtcttccagaaatgattttactctackttctgctttcatcctcacctcttctcctct

SEQ ID NO: 4242 - DNA, 61 bp, Homo Sapiens
tgtctttgaagacatctctgtgttgaataayttttctacatggcaaatagctaagaaaaaa

SEQ ID NO: 4243 - DNA, 61 bp, Homo Sapiens
tttcctctcatcacttttcaccacaaactcygcatgtgagcaacatcaaactgattttctt

SEQ ID NO: 4244 - DNA, 61 bp, Homo Sapiens
ttaacaacattgcctcaagggtctcttctamatgaggaagcaactgttttttcataaagaa

SEQ ID NO: 4245 - DNA, 61 bp, Homo Sapiens
gagctttattacataaagtgctttgtgtccwttatctcactttattctttcggcaacccca

SEQ ID NO: 4246 - DNA, 61 bp, Homo Sapiens
atatccaatctaaaattcacttcctataaargctagtcttgctttgacttgcctttactcc

SEQ ID NO: 4247 - DNA, 61 bp, Homo Sapiens
caaaaacctgggagtatattctatgccactytgtagttttttaaatcaatgataaaaattg

SEQ ID NO: 4248 - DNA, 61 bp, Homo Sapiens
tcccttctcccactatccactctcaagaggmccaagtgtctgttgttcccctctttgtgtc

SEQ ID NO: 4249 - DNA, 61 bp, Homo Sapiens
gaggccccaggtacatacacattaaacttcwaatcttgtccttaagtctcttttttctgtt

SEQ ID NO: 4250 - DNA, 61 bp, Homo Sapiens
ctgaattattcagcttggtttctacgatgayctgattcacagcttttattattgcactttt

SEQ ID NO: 4251 - DNA, 61 bp, Homo Sapiens
ccatacacttaattctctcacaataaaactytcatgacaaatgtggaaactgaggtagcaa

SEQ ID NO: 4252 - DNA, 61 bp, Homo Sapiens
gtattatttatctcagaagtgttgtttaccytgactttgcatgtgaatcttggttagaaaa

SEQ ID NO: 4253 - DNA, 61 bp, Homo Sapiens
aaatggtcatgggtgacagaactgtacttayaaaattgtatgcgtttttcaaatctgtaaa

SEQ ID NO: 4254 - DNA, 61 bp, Homo Sapiens
aatgtagacatgcagattagtacataacttytgttgaatatgtatagaatgtgtagaggaa

SEQ ID NO: 4255 - DNA, 61 bp, Homo Sapiens
cagagccagacttgaaccgggtcttctgcaytccagactctgtctttgcttgcatgtgatg

SEQ ID NO: 4256 - DNA, 61 bp, Homo Sapiens
tccccactttagttacacttaactcacttcmatcttctaaatacgtgattacctttctttt

SEQ ID NO: 4257 - DNA, 61 bp, Homo Sapiens
atttaacatactcaaagtgaacacatttatstttcctctgcaaacctgctgcttctgcatc

SEQ ID NO: 4258 - DNA, 61 bp, Homo Sapiens
gccttaattatttgtgagttatccacggttktgcagggagcataggagctatgatgagaac

SEQ ID NO: 4259 - DNA, 61 bp, Homo Sapiens
agggtctctctctgagtgtgggttctgtccyagcttttgccatctatcttctaccaactac

SEQ ID NO: 4260 - DNA, 61 bp, Homo Sapiens
tagcctttaataaggatagattcctacaagrtcagagagtacccagaaggcaggaagctta

SEQ ID NO: 4261 - DNA, 61 bp, Homo Sapiens
gactaaaacagccctgtcagtgggcaccccratactcacaacagctatttcagactctcac

SEQ ID NO: 4262 - DNA, 61 bp, Homo Sapiens
cttgttcaagggcacacagccagctactagmagaatctgggataagagacatgaactcccc

SEQ ID NO: 4263 - DNA, 61 bp, Homo Sapiens
catcgtgaccaaggatgataaatgaggcttrctttgggagcaggagttgtacagatgtgga

SEQ ID NO: 4264 - DNA, 61 bp, Homo Sapiens
gtcaccgtccatccatcctccagagtccatscgatccggtgcttttcaccagcctacccgc

SEQ ID NO: 4265 - DNA, 61 bp, Homo Sapiens
cacgtctgtttcaatctccttgcttttaagygaccccctccctatacaatcagggcagtaa

SEQ ID NO: 4266 - DNA, 61 bp, Homo Sapiens
ctttgctccacgtcatagaaatgtgaaacaygtcaatgctgagggatgatctgcgctcatg

SEQ ID NO: 4267 - DNA, 61 bp, Homo Sapiens
attcttgaatataaccacgctggcattctcyattcacctgctgatggacagcgggtcgttt

SEQ ID NO: 4268 - DNA, 61 bp, Homo Sapiens
ctgggagtgtcgtttagtgaggaaaaggcargtgatggagtcagacatatctgaactcaaa

SEQ ID NO: 4269 - DNA, 61 bp, Homo Sapiens
tctgcccgccccgtacatgcaatagtttggracattttgtaaataaccagaactcgcattt

SEQ ID NO: 4270 - DNA, 61 bp, Homo Sapiens
tcttaatggtttatgactatcctgtaatgcrggtagatgttttacttggaagtcagaaaaa

SEQ ID NO: 4271 - DNA, 61 bp, Homo Sapiens
acaagggggtgagagggagacgtttcagggmgcaatggctgagctgtcctaattaggccca

SEQ ID NO: 4272 - DNA, 61 bp, Homo Sapiens
ggcacatgcgtgtacaagaagagcccattcrcaaatcggatcaagaaaatgcagttgcgcc

SEQ ID NO: 4273 - DNA, 61 bp, Homo Sapiens
cggtgcaccaagctacatgacgcatctttgytgagctgtgacggtattccagggctgggct

SEQ ID NO: 4274 - DNA, 61 bp, Homo Sapiens
agagtatggggaaatttcaggtgacagatayaaaggacaaatgtttacccaaaaaatataa

SEQ ID NO: 4275 - DNA, 61 bp, Homo Sapiens
ggcattgtctgtttttaagacttctcacatrcctctaatttgcagtcaagggtagaaccat

SEQ ID NO: 4276 - DNA, 61 bp, Homo Sapiens
tgaaggtattcagcttgtgctaatagtctgkacttgttttaaagacccaggaggtcttttt

SEQ ID NO: 4277 - DNA, 61 bp, Homo Sapiens
gtggaaggagaaggacagtggaagaggagartcggttagaagacaaatgtaatatccaggt

SEQ ID NO: 4278 - DNA, 61 bp, Homo Sapiens
acctttctatatctttctctggccaataacrctgtgatgccattaaggcatgaagattcaa

SEQ ID NO: 4279 - DNA, 61 bp, Homo Sapiens
accccagtttcctcagctgtacagtggaaamatcaataggccatacttacagggctgtcat

SEQ ID NO: 4280 - DNA, 61 bp, Homo Sapiens
gtctttatttctccttcatgtttaaaggatrttttcactagctatactattttagggtaat

SEQ ID NO: 4281 - DNA, 61 bp, Homo Sapiens
catgtttctccatagttagggctttccgagygcttttaataacacctacgttgagaaacta

SEQ ID NO: 4282 - DNA, 61 bp, Homo Sapiens
catcccggtgggtttgcttggcctttaggaygtgtgactacagcttttgggtaggtacagg

SEQ ID NO: 4283 - DNA, 61 bp, Homo Sapiens
tctatccctacaataagggtgaaagaatttyagcttttttgtgagttttaactcttaccgg

SEQ ID NO: 4284 - DNA, 61 bp, Homo Sapiens
agaagcacccaggcctgtaatcatccagagrctaggcagcccagcaaaaaccttacactgt

SEQ ID NO: 4285 - DNA, 61 bp, Homo Sapiens
atcacactgagtcaggtgccttaagaaaatmatttagtctatctaggtctccctcttctta

SEQ ID NO: 4286 - DNA, 61 bp, Homo Sapiens
ttcagtgcatagggggttcacagctcttcaytttatttttaagcttcaaagcctacctatg

SEQ ID NO: 4287 - DNA, 61 bp, Homo Sapiens
taattctttattttctgttactcagcctaayatagcctctaagcaccagccctgtccagca

SEQ ID NO: 4288 - DNA, 61 bp, Homo Sapiens
tcaactgtggctacaaaccctgaccacccarggatgctgggggacctctgtcgtggacatc

SEQ ID NO: 4289 - DNA, 61 bp, Homo Sapiens
gccttctctgttacctgttacaagagccaamaaattccctgtttgatgcaggccagctttg

SEQ ID NO: 4290 - DNA, 61 bp, Homo Sapiens
agaaacattgtacccatttatatccacaccyctgaaagatgcacctgaatcatttgaatct

SEQ ID NO: 4291 - DNA, 61 bp, Homo Sapiens
aagagttttccagatgtttctggggttgctygcttcctacatctgttctaactgggaaagg

SEQ ID NO: 4292 - DNA, 61 bp, Homo Sapiens
ctaactaaggaccagacttatttttagcttsaaatgacattagctagaaagtatacactag

SEQ ID NO: 4293 - DNA, 61 bp, Homo Sapiens
aaactttaaaaagtaaacttctcaaacttgrcaggttccaacactgacttaaagctaattg

SEQ ID NO: 4294 - DNA, 61 bp, Homo Sapiens
actgccagacctcagaaatgtcctgttcccyaaaccactgagttttgttttcatggtctca

SEQ ID NO: 4295 - DNA, 61 bp, Homo Sapiens
aacttctgaatctcattcttggaaacttagygctagatatgaaatggaactcagggctgtc

SEQ ID NO: 4296 - DNA, 61 bp, Homo Sapiens
taggcctcatccccagagacttagatttgtkgggcctgtgatgaagccccagaatttgtat

SEQ ID NO: 4297 - DNA, 61 bp, Homo Sapiens
gcgagaagaagtaagctgggatacagaaaaytcacaccctcaacacacgatcactaacctg

SEQ ID NO: 4298 - DNA, 61 bp, Homo Sapiens
ttccttcaaaaattatcctgtgtgctgcctyccttaaagaaacacctgtgtcattggttac

SEQ ID NO: 4299 - DNA, 61 bp, Homo Sapiens
tattgttcagtgcaggcatttgcaatctttyagtgctctgagtttataattgaaactattt

SEQ ID NO: 4300 - DNA, 61 bp, Homo Sapiens
aggcatattagcacttttgtgtacactggtkttcttataataaatagttacattgagtata

SEQ ID NO: 4301 - DNA, 61 bp, Homo Sapiens
ccgggcagtcagatcgctgtggcagtagtcyagcgccgtgacacagggttttgttgcagcc

SEQ ID NO: 4302 - DNA, 61 bp, Homo Sapiens
gccagacactactctaagcactttgcacatmgaaacccgctcactaacaacaccacgaaat

SEQ ID NO: 4303 - DNA, 61 bp, Homo Sapiens
tgatttccaattgaataatcaagtaatgtgrtggtaaactggcctttggctggtgggaagg

SEQ ID NO: 4304 - DNA, 61 bp, Homo Sapiens
ctatttcataccacttgctatttcttacccraatgaagtgtaagagagtgagttaagagta

SEQ ID NO: 4305 - DNA, 61 bp, Homo Sapiens
gtctccaaagttgcagcctcatctctcaaamctgagtgctctgcttggtgtcactgctcca

SEQ ID NO: 4306 - DNA, 61 bp, Homo Sapiens
aatacttaatatgttttagtataacttatcwgcccaaataactgcataagatattagataa

SEQ ID NO: 4307 - DNA, 61 bp, Homo Sapiens
gcgttcttctttccactccaaaattagcaaytcagccatcatcttgtagagctgaatggga

SEQ ID NO: 4308 - DNA, 61 bp, Homo Sapiens
cattgtgggtaaactgtggatcgaacagtayggcaatgtggaaattataaaccacaagtaa

SEQ ID NO: 4309 - DNA, 61 bp, Homo Sapiens
tacatagttcatctgggatacagctcacaartctattctttaaacaatggttgaaaacaaa

SEQ ID NO: 4310 - DNA, 61 bp, Homo Sapiens
catcttattgctgagcgtagagttctgtacmtgattgtgtatatattgtagatactagacc

SEQ ID NO: 4311 - DNA, 61 bp, Homo Sapiens
gacatgataatctcactgtgggcaattttargcacccaaccatggtaatggccaaggaaga

SEQ ID NO: 4312 - DNA, 61 bp, Homo Sapiens
cccaaggctcactaaacattttaagaggacrctgaacattttcctagtggatggtgagata

SEQ ID NO: 4313 - DNA, 61 bp, Homo Sapiens
tcttatctggggattttcagttaaataatcrgacaatgtatatgattgatttctatactgc

SEQ ID NO: 4314 - DNA, 61 bp, Homo Sapiens
tgtgacactacatctctagctccaaaatctrcttaggttttaaagcctcttggaaatctct

SEQ ID NO: 4315 - DNA, 61 bp, Homo Sapiens
aggcaagggtgaagacacacctgcaggccaytaatcttgctacacagcatccctattttaa

SEQ ID NO: 4316 - DNA, 61 bp, Homo Sapiens
tcaaaatgcaaatatgaaaactatcaccttscaaccacggataacacttaaatgaattacc

SEQ ID NO: 4317 - DNA, 61 bp, Homo Sapiens
tatatacaatggcctaaaaatatgtaacgtrgaccctgactgggaagaaatctaagaaaaa

SEQ ID NO: 4318 - DNA, 61 bp, Homo Sapiens
cagtggttctcatcaaaatgagtgcagcttkgccctatgccgtggacgctcttctctctgc

SEQ ID NO: 4319 - DNA, 61 bp, Homo Sapiens
atgaactaagctaccattaaattagtgtttmagagaaaaatgcacactgttctgcttctta

SEQ ID NO: 4320 - DNA, 61 bp, Homo Sapiens
cttgacatgcttttcactgcttacatggttrgtttcctacctagctgaatgcaggcatctg

SEQ ID NO: 4321 - DNA, 61 bp, Homo Sapiens
aggctgttggttacctggccgggagctggcrgagaccaggatttctcctcgccgccgttgc

SEQ ID NO: 4322 - DNA, 61 bp, Homo Sapiens
agctctgctggcaccttcaaggccctgattkacacctaagggcacacaactgggatctgaa

SEQ ID NO: 4323 - DNA, 61 bp, Homo Sapiens
gaaatgcagattctcgaggcgcggctcacamctacccaatcagactacattttaaccagat

SEQ ID NO: 4324 - DNA, 61 bp, Homo Sapiens
cctatgtccctggttacgagccttgatatamttgtgctaaggcattttggtggagtggacc

SEQ ID NO: 4325 - DNA, 61 bp, Homo Sapiens
tacatttagttttgctactgtatatgagctyatgaaatggacttcccttccctaataatat

SEQ ID NO: 4326 - DNA, 61 bp, Homo Sapiens
acatgttaataattacataatattcactgaygtaaaggcactacagtgttaatttcccgac

SEQ ID NO: 4327 - DNA, 61 bp, Homo Sapiens
ttaaaagttcacctagctagcaagaagcaarggttgatttttgttgttcgtggtctttttt

SEQ ID NO: 4328 - DNA, 61 bp, Homo Sapiens
ccagaggggagggatggggtcgaaatcgttmtttagagagatccttttggcagagctgtag

SEQ ID NO: 4329 - DNA, 61 bp, Homo Sapiens
gttttaaacaatgactgttctttctccatcrtgtagaccaaaggccaagttctgtgtcccc

SEQ ID NO: 4330 - DNA, 61 bp, Homo Sapiens
acaggagacatttaattgcttgaaaagttcrttgatctaattcttgtaataaatcattgtt

SEQ ID NO: 4331 - DNA, 61 bp, Homo Sapiens
tcctggcaaggagtggaactattacatggcrgactcttttcactctcaagttgaaagcttg

SEQ ID NO: 4332 - DNA, 61 bp, Homo Sapiens
tgaatacatagactagaaataaggtacctcrgttcttacctggccacattaattggcactc

SEQ ID NO: 4333 - DNA, 61 bp, Homo Sapiens
cccacttctatataagcctcattgggaatayagcatcaacgccttgagtgctctgggtacc

SEQ ID NO: 4334 - DNA, 61 bp, Homo Sapiens
tatccaatgtattctgatatatttttgactkggaagttatggggttaatcatcatccttca

SEQ ID NO: 4335 - DNA, 61 bp, Homo Sapiens
tttcaaacaaataattttccccacgttttawcatctctataatctgcatacgggttttcac

SEQ ID NO: 4336 - DNA, 61 bp, Homo Sapiens
tcacttgtttgtcgttggtccagtgctaacscagcttcttggaggaggaaaccctggaaag

SEQ ID NO: 4337 - DNA, 61 bp, Homo Sapiens
agatgggttggggcagatccagcagattacrttactgtgagggggtggtggggaacacagc

SEQ ID NO: 4338 - DNA, 61 bp, Homo Sapiens
tggaaagccaccctgacattttcggctggcycagactccgaggttggagccctgtgcgtgt

SEQ ID NO: 4339 - DNA, 61 bp, Homo Sapiens
aatgataccatttatggacacattgcagctsaaggccatgcttaggagaagtggcccccct

SEQ ID NO: 4340 - DNA, 61 bp, Homo Sapiens
gagctggctctctttcatgattttctacctyttgtttctgattttaagaccatgtgcatgc

SEQ ID NO: 4341 - DNA, 61 bp, Homo Sapiens
gacaaggtgtttcttgattttgccattaagycaaaggtcctctgagtaaccaaaatagcta

SEQ ID NO: 4342 - DNA, 61 bp, Homo Sapiens
gattttgccattaagccaaaggtcctctgartaaccaaaatagctatattgtattgactgg

SEQ ID NO: 4343 - DNA, 61 bp, Homo Sapiens
cagaattcccagccctgccatgtttcacatyagtgctggccaccaggggtatcttgtgtgt

SEQ ID NO: 4344 - DNA, 61 bp, Homo Sapiens
gtgggagagtaaactggtgatgagaaagctmgtttgagaaagctgttgaagagagctactg

SEQ ID NO: 4345 - DNA, 61 bp, Homo Sapiens
ataggccatctccagaagcaaacagtggcawaaacagcaagaactataatccagcacagat

SEQ ID NO: 4346 - DNA, 61 bp, Homo Sapiens
gtcaccttgagaattcagacatgtggatgargtgttatagatggaaagccccaatcctggt

SEQ ID NO: 4347 - DNA, 61 bp, Homo Sapiens
aacatccattgagcatctaaaacattcaacrtgcagacttggcaagatgtagtgatgacga

SEQ ID NO: 4348 - DNA, 61 bp, Homo Sapiens
tgtagtaatgaaagtggaaatatgactggcygtctattcccttctgcaagccccctcaggt

SEQ ID NO: 4349 - DNA, 61 bp, Homo Sapiens
gtaaattctcaagttcttaaggctgaatgtyatcttgtattgtttcttgtatttgtgatat

SEQ ID NO: 4350 - DNA, 61 bp, Homo Sapiens
tttagttccaactaacaaagtctcactctawgcactcattttctacttctggatgtcttgt

SEQ ID NO: 4351 - DNA, 61 bp, Homo Sapiens
caaaacaaatagaagagcagtgagaatgaarccatggtgctatcttcgtatttatagtgat

SEQ ID NO: 4352 - DNA, 61 bp, Homo Sapiens
tacctattttattggctcacggtatggtagktcagaaatctggcatcgcgtgttggttctc

SEQ ID NO: 4353 - DNA, 61 bp, Homo Sapiens
catatcaagtagtatatgaatcacatggtaratttccgttacatcagttcactggaagtca

SEQ ID NO: 4354 - DNA, 61 bp, Homo Sapiens
tgacaacagcttaagcctggtgaactcttayttgctgttcttgatgctgggcttcctccta

SEQ ID NO: 4355 - DNA, 61 bp, Homo Sapiens
acagctaaaagttggacagagtggaagactytcagttatatgcctgattatagccaaacta

SEQ ID NO: 4356 - DNA, 61 bp, Homo Sapiens
tttctagttaggctagaatctttgtcttttktaagataaatgcggaagagtaatttctcaa

SEQ ID NO: 4357 - DNA, 61 bp, Homo Sapiens
ggaactattgccaggcttttaggagctgccrttgctaacaaatcagtttgggtaggcaggt

SEQ ID NO: 4358 - DNA, 61 bp, Homo Sapiens
atatatccatttgagtggataaatttgcttygcgtttggagagttttacttttcacctgta

SEQ ID NO: 4359 - DNA, 61 bp, Homo Sapiens
ttcaagtacttggaagcagaggataaacatrgccgttacagtgcagggaaagaatcactta

SEQ ID NO: 4360 - DNA, 61 bp, Homo Sapiens
gtaaatcatagagaattattcatggggttamaaagttagggaatattactttttatcatgt

SEQ ID NO: 4361 - DNA, 61 bp, Homo Sapiens
ttgtttactattgagtaagttcaagatagcrgacccacacaatttcccatgaagttctgtg

SEQ ID NO: 4362 - DNA, 61 bp, Homo Sapiens
aaatttaaacgactattttatggctaattaraaatgatgattgttcataagagaccatata

SEQ ID NO: 4363 - DNA, 61 bp, Homo Sapiens
atgtatatatagatatgtggccttatttagyaatggtaccattttgtgatgatcagatgac

SEQ ID NO: 4364 - DNA, 61 bp, Homo Sapiens
tttggtttttgaaagtacactgaggtggggratggagtatgcctcacccctggttactgca

SEQ ID NO: 4365 - DNA, 61 bp, Homo Sapiens
gggtgattcatttcttaaatttatctttgasagttgctgaaaatctcacagcttgtattct

SEQ ID NO: 4366 - DNA, 61 bp, Homo Sapiens
tgttgaataactctctatgctcactactacytctaaaagcccctttaagaaatggaatatc

SEQ ID NO: 4367 - DNA, 61 bp, Homo Sapiens
ttcttccaagaacaaataaaggcttgaacaytatttgtctgtttctgctctttcatagcta

SEQ ID NO: 4368 - DNA, 61 bp, Homo Sapiens
tccatacctcctctggtgattttatgtggtygtcaataaaagcagtttgcatgcaaggcaa

SEQ ID NO: 4369 - DNA, 61 bp, Homo Sapiens
tttgtaggcgttcaaagaccttctgaatccracctctgacacttctttgcaatccgaaatc

SEQ ID NO: 4370 - DNA, 61 bp, Homo Sapiens
ccagtgaaattttacttggcctgattaagcrgaaaagctgtagtctgttgaactgaagtct

SEQ ID NO: 4371 - DNA, 61 bp, Homo Sapiens
tcagtatatgcttcaaagacctgttgatccrgattgtgtaagaattagtgatactctgata

SEQ ID NO: 4372 - DNA, 61 bp, Homo Sapiens
ctacataaacaactgttgttttccaagttgrataaaagggataaacctttcagtctaggct

SEQ ID NO: 4373 - DNA, 61 bp, Homo Sapiens
cagattctctagggactgatcagaatctgcrttaaaccaagctctccaggcaactgatgct

SEQ ID NO: 4374 - DNA, 61 bp, Homo Sapiens
atgcatattccttacgctgtgtgtagatttkccacttacttctgtatctatacatattcct

SEQ ID NO: 4375 - DNA, 61 bp, Homo Sapiens
aggcacaagggagaatagggcattttatttyctggaattactgacaaattatttcttcaaa

SEQ ID NO: 4376 - DNA, 61 bp, Homo Sapiens
taaatgacttggttaaatatattggtatggrgcaatgtataatcacagtcttattaccttc

SEQ ID NO: 4377 - DNA, 61 bp, Homo Sapiens
atgttaagataataacataatactctttggrttcagcaatctttgacatttattttctcca

SEQ ID NO: 4378 - DNA, 61 bp, Homo Sapiens
aagttagaaaacagacaaattcgtggcagcrctttacataaaacaggaaaatgaatgaact

SEQ ID NO: 4379 - DNA, 61 bp, Homo Sapiens
aatgaaaagagactattaatttagcagtgastttgatctaatcataactagaggaatataa

SEQ ID NO: 4380 - DNA, 61 bp, Homo Sapiens
gacgtagaaatgttttgctctgagatgtgtrtaagcgtaataattcatcattatattggct

SEQ ID NO: 4381 - DNA, 61 bp, Homo Sapiens
acaatacagtgctaaaatgacaatgttataygacaaacctgtagaacttattcatcttgca

SEQ ID NO: 4382 - DNA, 61 bp, Homo Sapiens
gctatctgggcattctttaacccattcctgytgacacataaaagccatcacaatatgcaat

SEQ ID NO: 4383 - DNA, 61 bp, Homo Sapiens
tgggggagctgatttattaatctattggaastgctccaagtcaactaattcagccatacgg

SEQ ID NO: 4384 - DNA, 61 bp, Homo Sapiens
acacggctggaggccacctacttctcacctyctgggcctggcagcctcccccagcctgatc

SEQ ID NO: 4385 - DNA, 61 bp, Homo Sapiens
ccagccatgcctgaagctgtcatcagttacrtaataacacatttccttttcactgcttgaa

SEQ ID NO: 4386 - DNA, 61 bp, Homo Sapiens
tgggctccctagggacatctccatcaggaakatcctttgttcctgaccccacctcctctac

SEQ ID NO: 4387 - DNA, 61 bp, Homo Sapiens
ttggagttgaagacaatcttcatgtgacaawaaagtaaaatgtgagaaaacagtagatgat

SEQ ID NO: 4388 - DNA, 61 bp, Homo Sapiens
gcatcacagatagggatcagggactgtaacyggaaaatagagaaaagagtcttttcccctt

SEQ ID NO: 4389 - DNA, 61 bp, Homo Sapiens
tttaagtaaaaataagtactctgtatcaaaygatcaacatgaatacaaaataccaaagctt

SEQ ID NO: 4390 - DNA, 61 bp, Homo Sapiens
tgaaagaaaaggaaaacagcaagtcagtctrtcttatgaacatagatggaaaaaatgtaaa

SEQ ID NO: 4391 - DNA, 61 bp, Homo Sapiens
gtttattgcttgaaataccatatatatcctkatgccttccaaatgccatgcccagcccaga

SEQ ID NO: 4392 - DNA, 61 bp, Homo Sapiens
ccaagcccaagacaggagttctcaaatgccrtgatttactgagggaatgcctttgggggaa

SEQ ID NO: 4393 - DNA, 61 bp, Homo Sapiens
atttttactcacattacaactaaccgccttmaagtatacaattcagtggtaagtagtgtac

SEQ ID NO: 4394 - DNA, 61 bp, Homo Sapiens
agtagcataaccggaattatcactgaaatargcttgcacagtatcgcaatttcatggaagt

SEQ ID NO: 4395 - DNA, 61 bp, Homo Sapiens
ctggtaaaatctgtaacagacgctcagaggrcttggccaatcagcacaaagcagcacagct

SEQ ID NO: 4396 - DNA, 61 bp, Homo Sapiens
ggaccctgcctgcaccttaccctctgcttcsttcttgaaaatccctctccttggtgctgaa

SEQ ID NO: 4397 - DNA, 61 bp, Homo Sapiens
taaataatgaatttgtaaaaagaatacactkgtctatgaggagttgaacttgttgctcttg

SEQ ID NO: 4398 - DNA, 61 bp, Homo Sapiens
ggtggcccacttatcccactaactaccatawcttcatttcgtctgctttttgcaaagaaca

SEQ ID NO: 4399 - DNA, 61 bp, Homo Sapiens
caattccaaacagccaagcctaacaagtagytcatcttagcttgtggattcagagcactgg

SEQ ID NO: 4400 - DNA, 61 bp, Homo Sapiens
gtctttgcagatgtaactaaattaagatgargccaccctgaattaggatgtgtcctgaatc

SEQ ID NO: 4401 - DNA, 61 bp, Homo Sapiens
ctaccttcctttctctccattagatttccasggatggctttttgggggaaaggaattggta

SEQ ID NO: 4402 - DNA, 61 bp, Homo Sapiens
gatacccactcaaaaatgcattattaatccrgttctcagcaacttctactcactaccatca

SEQ ID NO: 4403 - DNA, 61 bp, Homo Sapiens
ttgtctgtttccactcccttccctgcattaygtgacaagctccttctcaaacttcagatct

SEQ ID NO: 4404 - DNA, 61 bp, Homo Sapiens
cttctgctactgcatcattatctgtttccasttcgccattctcttcttgtatcagtcagct

SEQ ID NO: 4405 - DNA, 61 bp, Homo Sapiens
cttgctgctgtattcctcatgttcaagacasccttcttactggcactgaaggaaccatctt

SEQ ID NO: 4406 - DNA, 61 bp, Homo Sapiens
aacaaggaagctttgattcatgaaattctgragatggaaaaaagaaatatatgctagtttt

SEQ ID NO: 4407 - DNA, 61 bp, Homo Sapiens
atgtatcccccatggataaggggagactatygtatccttgattggggcattgctacatgga

SEQ ID NO: 4408 - DNA, 61 bp, Homo Sapiens
cctttgtagaggaagccatttctaccctctrtgggctgacaggagaattgcacaaagggat

SEQ ID NO: 4409 - DNA, 61 bp, Homo Sapiens
taaaaactggggaaagaggatgaccaacacraaatcaccatcctaaaagagttgacagtct

SEQ ID NO: 4410 - DNA, 61 bp, Homo Sapiens
cgtcacactgagagtatctggagaccttcaygttggaggagtgatgctcaagttagtagaa

SEQ ID NO: 4411 - DNA, 61 bp, Homo Sapiens
ttaaatttctattcaaatgtattttttagarcttgattgttgttgcccgtacatgtatacg

SEQ ID NO: 4412 - DNA, 61 bp, Homo Sapiens
cttccatgggtggaatcattggaggtcccarattaagaggtcatgtattcaatattcaata

SEQ ID NO: 4413 - DNA, 61 bp, Homo Sapiens
ttcaagtgatacacccgtttcagcctccctrctgggattacagacatgagccattgcactg

SEQ ID NO: 4414 - DNA, 61 bp, Homo Sapiens
ctacattaggctataacttttctttggatcmgtgccatgtgaacactagaaaccaacacag

SEQ ID NO: 4415 - DNA, 61 bp, Homo Sapiens
tgggcaccaccagcagcaaccactctggtgrctttaatttctggtaagtcagacttttaaa

SEQ ID NO: 4416 - DNA, 61 bp, Homo Sapiens
ctaactgtatatttgtacccaccactaatcwttccatagcttgcaagaccagctctatcta

SEQ ID NO: 4417 - DNA, 61 bp, Homo Sapiens
ctcctgaatcagacatgtcagtgaggtgatrctcatataggagtcagttacctaaaagtga

SEQ ID NO: 4418 - DNA, 61 bp, Homo Sapiens
ggggcacttcagttctcctctaccctggtcstctctaatcctcaacagactaactagccca

SEQ ID NO: 4419 - DNA, 61 bp, Homo Sapiens
tcctacgtcacagggtgattgtgagaattcmgaaagtcagtatgtgtggaatacacaggcc

SEQ ID NO: 4420 - DNA, 61 bp, Homo Sapiens
aagccaccacctttcaggaagacctccccamctggacttttaaaatagcctttctctccag

SEQ ID NO: 4421 - DNA, 61 bp, Homo Sapiens
actctagtggtacactaggcattaggcttgwctaaatgccagcatagattccaggtgctat

SEQ ID NO: 4422 - DNA, 61 bp, Homo Sapiens
gattggttcaattcagctgcttttacgaatrtcctccataaaaatttctaaaatttcaatg

SEQ ID NO: 4423 - DNA, 61 bp, Homo Sapiens
tcaattcaaaccatggaaacatgtgaactakgacttgatctaggtccatataaatgataat

SEQ ID NO: 4424 - DNA, 61 bp, Homo Sapiens
tcatgctttttaacgctttttcatggcttcrtattactttattgcatgaatgtagcttaat

SEQ ID NO: 4425 - DNA, 61 bp, Homo Sapiens
tgttggccccctaattggtttttcctacagrgtatcatttacagacataccttttgtatgt

SEQ ID NO: 4426 - DNA, 61 bp, Homo Sapiens
acactggaattttacatctagacagcttgayaaatggcatgactacaaagtaatgcctcat

SEQ ID NO: 4427 - DNA, 61 bp, Homo Sapiens
tggctgtggtattggacagtgccaatatgcracttttccacaattacggacagttctattg

SEQ ID NO: 4428 - DNA, 61 bp, Homo Sapiens
ttgcatagatgtcacaaggagtccagaatcycttgattttcagacatagccattagaagca

SEQ ID NO: 4429 - DNA, 61 bp, Homo Sapiens
ccctgcgagggtttagttgtcttgattacaraggcccacatccctcagaaagtaccctcat

SEQ ID NO: 4430 - DNA, 61 bp, Homo Sapiens
ccacatccctcagaaagtaccctcatgtcgscagctggacaaccttaaggattgtcattgt

SEQ ID NO: 4431 - DNA, 61 bp, Homo Sapiens
aaaaggcccccagaaatttaagaggccatcmttatggcataaacattggctaataaagatt

SEQ ID NO: 4432 - DNA, 61 bp, Homo Sapiens
gtccagtatattgtattatcctacttattaygtgctggattctaattctgaggaaagaaag

SEQ ID NO: 4433 - DNA, 61 bp, Homo Sapiens
atgtctccattttcagcatattaaccactcmgttatcaaggtcttttgatactttatattt

SEQ ID NO: 4434 - DNA, 61 bp, Homo Sapiens
tgagtaaattagggcatgtgtaagacaatartgagtgagggaattgcagtaaactagatta

SEQ ID NO: 4435 - DNA, 61 bp, Homo Sapiens
catggaaaccacctttgcagaattaagtcartgagagaaatctgatatacctgactccatc

SEQ ID NO: 4436 - DNA, 61 bp, Homo Sapiens
aattctaattctcctttatcattcagttacrtgacaaatttttattgagcacctactatgt

SEQ ID NO: 4437 - DNA, 61 bp, Homo Sapiens
agaaggacagtatctctttcggaaaaatctkcagtcatccaaaagactttactgtgaaaag

SEQ ID NO: 4438 - DNA, 61 bp, Homo Sapiens
gtaatcaagcccttctaccatttagttgaaratgagagattgggggatttgacctcataaa

SEQ ID NO: 4439 - DNA, 61 bp, Homo Sapiens
ggcagttcgtttggcagtccagccttgtgaytggaaaaggacatcaccatgcctccctgca

SEQ ID NO: 4440 - DNA, 61 bp, Homo Sapiens
ctcgcaggccaaggaggaggtgatgaagggygagtctgagcataacctgggaccacaccga

SEQ ID NO: 4441 - DNA, 61 bp, Homo Sapiens
tgtaaggctaaaaggagtatgtgaaaggaayactgaagggcagaagacttcctgagaaagc

SEQ ID NO: 4442 - DNA, 61 bp, Homo Sapiens
tttgtctgggacttctaaggaaaagcgaagrattggcagaaaaatgtgtgaaatttgtctg

SEQ ID NO: 4443 - DNA, 61 bp, Homo Sapiens
aaagcaacttggtgtgtactgtacgtgtggkatgatcaccaattgctgtttttacaactgt

SEQ ID NO: 4444 - DNA, 61 bp, Homo Sapiens
gactctttatcagttactatggtggtaagtrcaagcaaggaagacagaggaaattctctag

SEQ ID NO: 4445 - DNA, 61 bp, Homo Sapiens
agaagtaaaattaaatagtgcctgcctttgraaaaagatggggttagttgagtgagagaga

SEQ ID NO: 4446 - DNA, 61 bp, Homo Sapiens
atttgcccaatattggtgctcgtaaaaacarttaccctgaaattattagtgctgtatgttc

SEQ ID NO: 4447 - DNA, 61 bp, Homo Sapiens
gtttcaaggataaatttctgcttttccaaaytgaagttcatcagggagtagagaaaaaatg

SEQ ID NO: 4448 - DNA, 61 bp, Homo Sapiens
tagcaaagattggtcactgttgacttatctstcatttacttataataggtatcatgtatcc

SEQ ID NO: 4449 - DNA, 61 bp, Homo Sapiens
ggagttatgtattgaatacacatttatcacmaggaaatctgaagatgttgaccatggttct

SEQ ID NO: 4450 - DNA, 61 bp, Homo Sapiens
atttcataaaatcattccaaaaatatgcacrtttccaaacttatgttaagaggccaatata

SEQ ID NO: 4451 - DNA, 61 bp, Homo Sapiens
tgaatggcactgagtgtcctttgtccatgtsttgtataatagacttctccagccaagcctg

SEQ ID NO: 4452 - DNA, 61 bp, Homo Sapiens
ataaattctgcaagtgagtttaatgttcacraaaatcatcaacagcaaatgtagatgcatg

SEQ ID NO: 4453 - DNA, 61 bp, Homo Sapiens
tgtgtctcctccatattcagtcataaaagtyctaacccccagtatctcagaatgtgactat

SEQ ID NO: 4454 - DNA, 61 bp, Homo Sapiens
aatcttggcctctacaaaccatgtggtaggktgcttgtggttctcacttattttcacattg

SEQ ID NO: 4455 - DNA, 61 bp, Homo Sapiens
gctcttaaggtttacctcataggactcactmttagttgtaattaaaactgaccaaaaaatc

SEQ ID NO: 4456 - DNA, 61 bp, Homo Sapiens
gagaacggtccaactcaggtaggcggatgaygaaggaagagtgggaacatttacaaagaag

SEQ ID NO: 4457 - DNA, 61 bp, Homo Sapiens
cagacagggaaatataatcctcttttaggamgaagtagagacaagttgaaaccataatgcc

SEQ ID NO: 4458 - DNA, 61 bp, Homo Sapiens
aagcatctgctgtggtttcaatacacctgaycttccttccatgcatgtcctttggtgaggg

SEQ ID NO: 4459 - DNA, 61 bp, Homo Sapiens
aaatagatttgaaaagctgattgattttccygcacataaattctggatgtcaatttccaac

SEQ ID NO: 4460 - DNA, 61 bp, Homo Sapiens
agatctctggattccgattcaattttagtgrttgcaaaaacaaggctcttggctatttgca

SEQ ID NO: 4461 - DNA, 61 bp, Homo Sapiens
gggtgcctccacctctgagtctatggcatgytctagccgtgaaagcttttggctgcttctg

SEQ ID NO: 4462 - DNA, 61 bp, Homo Sapiens
tagacgagacagaaagacaaagcaagacaaygacagagatagaaaatacaggagacagaaa

SEQ ID NO: 4463 - DNA, 61 bp, Homo Sapiens
catattctgggtagtgatttttgcctcttamcttacttgatattttaataaactcacatac

SEQ ID NO: 4464 - DNA, 61 bp, Homo Sapiens
tcgtggtctcctagcttatctcctttctctyggatcaattacagaggccggactccaggtt

SEQ ID NO: 4465 - DNA, 61 bp, Homo Sapiens
ctcaacagatggtgactcctggcactgtgaytccgttcttaaaaaggcgttatattattca

SEQ ID NO: 4466 - DNA, 61 bp, Homo Sapiens
ttgacacactagcaactgcctggactaatayatggcccttggctggatataagagctactg

SEQ ID NO: 4467 - DNA, 61 bp, Homo Sapiens
agtcaatttcatgagaaatgtggaattctcrgggtacagtgtaaaaaattcttgacactct

SEQ ID NO: 4468 - DNA, 61 bp, Homo Sapiens
agccacagcagagggagctactaggattgamatcacagtggataatggcaccaacaatact

SEQ ID NO: 4469 - DNA, 61 bp, Homo Sapiens
actacaacatttatgttgcacttatccaaakatttgaccagaatagaaaatgccccttcca

SEQ ID NO: 4470 - DNA, 61 bp, Homo Sapiens
tcagctgcatccaacgtccactgagagctaytgtgggctaaagatggtttggctgagagtg

SEQ ID NO: 4471 - DNA, 61 bp, Homo Sapiens
atcacccctgatagtcacttaaatttgaaastaaccctgtgagatatgaggctcatgccat

SEQ ID NO: 4472 - DNA, 61 bp, Homo Sapiens
gcaagtttctgcctctgctcttcaatctccrtgcccagggtggagtgcctctgcagcgcag

SEQ ID NO: 4473 - DNA, 61 bp, Homo Sapiens
ttttaatctcttctctgtcctgctttcaagstaagctcagttttacacttatagaatccaa

SEQ ID NO: 4474 - DNA, 61 bp, Homo Sapiens
ctttcacataaaattggagtagggtgggagragaaccaccagcagcggcaaaatgaggtct

SEQ ID NO: 4475 - DNA, 61 bp, Homo Sapiens
agtatatctttattagcacatgaaaacactytaatacaggtggacacagagaatcaaaact

SEQ ID NO: 4476 - DNA, 61 bp, Homo Sapiens
aaaaaattagagatggtaatatgctaatcargcactaaccagaaagcaggagaaaaaccaa

SEQ ID NO: 4477 - DNA, 61 bp, Homo Sapiens
ttctactggcctcagtgttcaaatatttacmctcaataatttccacagatgttcaagatgc

SEQ ID NO: 4478 - DNA, 61 bp, Homo Sapiens
agtaatgataaaaggaaatgtgaaactctcraaattagctgtttgttcctctcatttgttc

SEQ ID NO: 4479 - DNA, 61 bp, Homo Sapiens
ccaatggccaggccagtaacccagcccagtkaaatatgaatctaagggggtgtgaacctag

SEQ ID NO: 4480 - DNA, 61 bp, Homo Sapiens
tgaacgttctttctttctagaatccactctraaacctgtaatgatccacacaacctgggaa

SEQ ID NO: 4481 - DNA, 61 bp, Homo Sapiens
gggtttgaagtttcctcctaaatctccgcaytgaataggactcaaggttaagtggcttctt

SEQ ID NO: 4482 - DNA, 61 bp, Homo Sapiens
acttcaagtaaccaaacaactgtgaaagaargtttctcctttagagatattccagctaaaa

SEQ ID NO: 4483 - DNA, 61 bp, Homo Sapiens
ctctaccacgtcagagggagctacaaggttyggaggatggattcagagtgcacatagaacg

SEQ ID NO: 4484 - DNA, 61 bp, Homo Sapiens
tttttttaaagcaaaggataaatttgtggasaagtgacaggacaaatgggtttaggcagta

SEQ ID NO: 4485 - DNA, 61 bp, Homo Sapiens
tttcttacagaaattgctagtacagaaagawtccaggttcaaataatcaaggcaaatcttt

SEQ ID NO: 4486 - DNA, 61 bp, Homo Sapiens
agggagcactcaaacagcgaattaataaaastgtgcaaacccataaggttggaagaagaca

SEQ ID NO: 4487 - DNA, 61 bp, Homo Sapiens
cctataacagacaaggttatggcctctcatyctacagcacaacaccccgatcccccaagga

SEQ ID NO: 4488 - DNA, 61 bp, Homo Sapiens
agccatccagtttgtcacgcattatcagcastccagcacccagagacgcatccgcgtgacc

SEQ ID NO: 4489 - DNA, 60 bp, Homo Sapiens
tatttgaactgaaacaatatagttgtgccartaaagacagaaaagactaaagacaatata

SEQ ID NO: 4490 - DNA, 61 bp, Homo Sapiens
agttataccagagctgaactccttgaaggargtgtgtaggtctctcagggactgctcttgg

SEQ ID NO: 4491 - DNA, 61 bp, Homo Sapiens
gcgaaagaaccctggtgtgggcaacggagaygacgaggcagctgagttgatgcagcaggtg

SEQ ID NO: 4492 - DNA, 61 bp, Homo Sapiens
catctgtccctaccagagtgttgtgttctgragacagctgaaaccaatgacctccaagccc

SEQ ID NO: 4493 - DNA, 61 bp, Homo Sapiens
tggtgcaaaaggaagttacaggactagggasttctgaattatttatctttctccttccatt

SEQ ID NO: 4494 - DNA, 61 bp, Homo Sapiens
atagagattttcctggagattaggcccaaamgatggttttattgcataccatgcagcaaaa

SEQ ID NO: 4495 - DNA, 61 bp, Homo Sapiens
acttgggctttcagagctcaagggaaacttmgagataaagtggctgatctcaccatacaga

SEQ ID NO: 4496 - DNA, 61 bp, Homo Sapiens
gaaagtactaaatttccatttgtggagttayctgctcagaagtttctggccttattttccc

SEQ ID NO: 4497 - DNA, 61 bp, Homo Sapiens
gtagagacttagcaaatgttggttccctctyattgactcactcacactttggacaagaccc

SEQ ID NO: 4498 - DNA, 61 bp, Homo Sapiens
gtctgtgacccacacgttaatatggcctcaytttgactaagaccactattcgagtaggttt

SEQ ID NO: 4499 - DNA, 61 bp, Homo Sapiens
aataagatttccagaccaatttctcaagctratagattctactacgcctcaaacaagactc

SEQ ID NO: 4500 - DNA, 61 bp, Homo Sapiens
tgatatataacaaatgcagaggtagcctcaygcattaaacgtctttttcttgctgatggaa

SEQ ID NO: 4501 - DNA, 61 bp, Homo Sapiens
cttgtgcagccctggcctccttttaatgtcyagaccagcatttctcaacctcgacactact

SEQ ID NO: 4502 - DNA, 61 bp, Homo Sapiens
cattgggctaggtactggagctacaaatacraccaaagtagacatggtccctgtcctcata

SEQ ID NO: 4503 - DNA, 61 bp, Homo Sapiens
tttccctttccacaatttcatttcttcttcyatttaacagcatggaactttccatcctttt

SEQ ID NO: 4504 - DNA, 61 bp, Homo Sapiens
gcaataagtagagggttgaatcaggatctcyttacactccaattgttaagggtaatcatgt

SEQ ID NO: 4505 - DNA, 61 bp, Homo Sapiens
tctctaatcactttgttcctttgggaattcwtgatctgcgaggaaaactaacccacagttt

SEQ ID NO: 4506 - DNA, 61 bp, Homo Sapiens
aagtgagcccctaggtgttaaagtaccaaargctccaatttactaagcacctactaagttc

SEQ ID NO: 4507 - DNA, 61 bp, Homo Sapiens
tagatgttcaatgctgattaaactttctacratttatgcgcaacactgttttcatacaata

SEQ ID NO: 4508 - DNA, 61 bp, Homo Sapiens
acttgcaaattactcgaaaggaagataaccrgtaaggaaatggtcagtaagatatggatgg

SEQ ID NO: 4509 - DNA, 61 bp, Homo Sapiens
gacactgggtcttcacacacacagcaaggaytgttaattcaaatgttccagcacgtgaagc

SEQ ID NO: 4510 - DNA, 61 bp, Homo Sapiens
tgttgtcatacttcaaatcatattccaaatragcatcaaaaataataacatgcggccgggc

SEQ ID NO: 4511 - DNA, 61 bp, Homo Sapiens
atttttttcagctccaatgtgggaatgttayagctaaagagtattgttaaaggctattgtg

SEQ ID NO: 4512 - DNA, 61 bp, Homo Sapiens
ttctcatctttcttggaaagtgggatgaacragcagaaataacaggaaggcaaattcaagc

SEQ ID NO: 4513 - DNA, 61 bp, Homo Sapiens
gaatggatagaccatctcaaccagcaccctrtaaaaaggacagtgaccaactggtatgtgt

SEQ ID NO: 4514 - DNA, 61 bp, Homo Sapiens
atgtgaacatatgtagtggaggaataaaagragtcagacaagcattagagctggggttttc

SEQ ID NO: 4515 - DNA, 61 bp, Homo Sapiens
agtttgcccaagaacacataggtagcaagargggaagccaggacttgaactaacatcctct

SEQ ID NO: 4516 - DNA, 61 bp, Homo Sapiens
attatgcacacaaaagaacagttggagattrgtcagatgctccagtcactgtagtgagggc

SEQ ID NO: 4517 - DNA, 61 bp, Homo Sapiens
cgaaagcaagtaagacctagtcttcctccgyctggcagcggggagagacagatgcaaagct

SEQ ID NO: 4518 - DNA, 61 bp, Homo Sapiens
ctggaggggaatgtctgtggtttttaagctstctcctctggaaacagcatctcacagcgcc

SEQ ID NO: 4519 - DNA, 61 bp, Homo Sapiens
ctgtgactcaagggcagccacaactctgtgycagccataattgccatgccatgcaagaatg

SEQ ID NO: 4520 - DNA, 61 bp, Homo Sapiens
ggtctccagcttcccagccctcagcatgcamggtgagatggatcctcctagaatacaagtt

SEQ ID NO: 4521 - DNA, 61 bp, Homo Sapiens
gctgagagctctctcttctctgttacaaaaygagataagcaagtgttagaattgccttaag

SEQ ID NO: 4522 - DNA, 61 bp, Homo Sapiens
gacacagtcttgggactcttggtgggaacaytgtaagagattcagagtctcacagagccag

SEQ ID NO: 4523 - DNA, 61 bp, Homo Sapiens
ggtcttatcagccttggtatcttagatgaargagaatgcgctgtgaagtcagtggacctgg

SEQ ID NO: 4524 - DNA, 61 bp, Homo Sapiens
gcctggccaggcgtgaacattttaacagtcrtgaaagattccattgatgcgcctgttttac

SEQ ID NO: 4525 - DNA, 61 bp, Homo Sapiens
tgcccctccaggcgcccccaccgttgctctytctggcagcttttgtgaatctgggcttgct

SEQ ID NO: 4526 - DNA, 61 bp, Homo Sapiens
cagccctgggaagggaagggaggtgctgtcstaactctggtcttacaaatggactccagcc

SEQ ID NO: 4527 - DNA, 61 bp, Homo Sapiens
ctctgcctgggctctggaagaggccttcccrtggccatttctgtggagggagggcagctgg

SEQ ID NO: 4528 - DNA, 61 bp, Homo Sapiens
catggccaccctgtcaatcttgagggccatrgagtgacatttgggtgccctgtggtgccca

SEQ ID NO: 4529 - DNA, 61 bp, Homo Sapiens
cgttcctgagagctgccccattaaagtctcygtcacagccttttattaagcatgttattaa

SEQ ID NO: 4530 - DNA, 61 bp, Homo Sapiens
agatcagaaatattcggaggaagaattgtgsctgtactgaacatggacagattttttcttg

SEQ ID NO: 4531 - DNA, 61 bp, Homo Sapiens
aggaagaactgaccagctgcacatgcatttratgatggacttctataaccatcttgttcac

SEQ ID NO: 4532 - DNA, 61 bp, Homo Sapiens
caaaattaactttctggaagtcccacaaaaygtttccacttaatcacagtggtcagcactt

SEQ ID NO: 4533 - DNA, 61 bp, Homo Sapiens
gaaaattttaatacgatgcatgggaagggargagaagaggtaggagcaagagtagaaaagg

SEQ ID NO: 4534 - DNA, 61 bp, Homo Sapiens
ttggcacttattctaacaagtgttccatacwaaggtaagatgtaaacagcagaggaaacag

SEQ ID NO: 4535 - DNA, 61 bp, Homo Sapiens
tcagcatcgacagggaagacagttttttcaytgtcagccgttctgactggccgggtaggaa

SEQ ID NO: 4536 - DNA, 61 bp, Homo Sapiens
tccctgacagcccctgaggcaccgtctgaarcagggtcggagctggatggatcctggggag

SEQ ID NO: 4537 - DNA, 61 bp, Homo Sapiens
ggctcaagtcttcatgacctagagaactagygccgtccctatttctgcacttctccagatc

SEQ ID NO: 4538 - DNA, 61 bp, Homo Sapiens
tgctgcccaaggaggcgcagatctgcgagargcccaacctgaacgccatcaacatcacggc

SEQ ID NO: 4539 - DNA, 61 bp, Homo Sapiens
ttggcctggaagcctcagcctgtgcagaaarcaagaaaaaataaaagatgtaaaggttgga

SEQ ID NO: 4540 - DNA, 61 bp, Homo Sapiens
accacctcgaatttggaaatactttcttcayttaacagagaggttgagtaaattgcctcag

SEQ ID NO: 4541 - DNA, 61 bp, Homo Sapiens
gaccgaaagcagtctgaaaatgtctgaaaaragtcggaaaatgtgtgtgtgtgtgtgtgtg

SEQ ID NO: 4542 - DNA, 61 bp, Homo Sapiens
cacactaaatgcttacttgcagatccacctrggtagttctccgtagagggaagagcttccc

SEQ ID NO: 4543 - DNA, 61 bp, Homo Sapiens
ttcaaagtcatattctaatgctccaatttcraaaatagttactagtgtctggtaattctac

SEQ ID NO: 4544 - DNA, 61 bp, Homo Sapiens
ccctagccaacagcaagttcattaaccatcytgagacggaaatgcttagctaaatttcttc

SEQ ID NO: 4545 - DNA, 61 bp, Homo Sapiens
tctttttcctgaatcgatgtaaacagagccyggacggccgtatcgaagtcaaagggcagca

SEQ ID NO: 4546 - DNA, 61 bp, Homo Sapiens
tatttggattgaagtacatatcttgaatcarattaaagttgtacagcatgtaaggctaaat

SEQ ID NO: 4547 - DNA, 61 bp, Homo Sapiens
tcaatggatacaaaagtatgtaatagaaggrggctgatgatcagggagggatagaaaaatt

SEQ ID NO: 4548 - DNA, 61 bp, Homo Sapiens
ctactagcctagttgtgcagtcataaagttytgcgttagggctaaagttatggtagaattt

SEQ ID NO: 4549 - DNA, 61 bp, Homo Sapiens
ggaaacagggaaattccattctgagttgatmcagtgtaactaaggaaatacttacccttgg

SEQ ID NO: 4550 - DNA, 61 bp, Homo Sapiens
agctaaaagctgcacacagatttttgatagmggttagaggtaaacaatgttcactagttgc

SEQ ID NO: 4551 - DNA, 61 bp, Homo Sapiens
caagctgtgtgctcgctatcagggtgatatracttccaaacctcagcatcatgcatttccg

SEQ ID NO: 4552 - DNA, 61 bp, Homo Sapiens
agagatctttcacctacttgcttagatgtaytcctcagtattttattatttctgttactat

SEQ ID NO: 4553 - DNA, 61 bp, Homo Sapiens
tttcagatatctttcttcctgcctcttgtamaaatgttgaaattctcatttgtgctgttaa

SEQ ID NO: 4554 - DNA, 61 bp, Homo Sapiens
ttgccttcttctcttgggtttaatatatatwtcacgtccaacatttctatttttaatatac

SEQ ID NO: 4555 - DNA, 61 bp, Homo Sapiens
atgacataacagtccctggaaaacagtaaaygagatttgctaagtattgttgtcaagctga

SEQ ID NO: 4556 - DNA, 61 bp, Homo Sapiens
tgatgcatgatttgcttactcacaatctaakatcttttctgtaacttgtctctgggcctct

SEQ ID NO: 4557 - DNA, 61 bp, Homo Sapiens
aggacagctggattttcatactggcttctgygttcaatctgttatatcatgtgatgtgtag

SEQ ID NO: 4558 - DNA, 61 bp, Homo Sapiens
gtgccttgaaattatttggatcacaaaagamccaagtcaggtacattaaaacttcagaagg

SEQ ID NO: 4559 - DNA, 61 bp, Homo Sapiens
tcctctatgagcaaagcaccttcatcatttkattagttaagccacagatttcatttgtttc

SEQ ID NO: 4560 - DNA, 61 bp, Homo Sapiens
tgatcagcttttcataatcataggcctcttygggctagcacttttcatacatcacacttgg

SEQ ID NO: 4561 - DNA, 61 bp, Homo Sapiens
tggagagaatttaactccaagatcatccccygtgcactctgaggggctgggacaggatgtg

SEQ ID NO: 4562 - DNA, 61 bp, Homo Sapiens
catagtcacatcctggctgggctaacaccayctttccccgcctctgggtgcgtggggaccc

SEQ ID NO: 4563 - DNA, 61 bp, Homo Sapiens
atgggagggaatcaaatggatagagcatttmtcccttttgtgactaaaataaaggtaatag

SEQ ID NO: 4564 - DNA, 61 bp, Homo Sapiens
aattttgctccagcagtcagttccgttactsactgatcatctgaacttcgtgcagcctggt

SEQ ID NO: 4565 - DNA, 61 bp, Homo Sapiens
cagaaaggctggaaggaggggacccaaacargaccttgaaggttcattctccattgagaag

SEQ ID NO: 4566 - DNA, 61 bp, Homo Sapiens
cccaaatgcatttgcttccatctctctagcmctctctgccttcaaggatgcggggaaattt

SEQ ID NO: 4567 - DNA, 61 bp, Homo Sapiens
tcctggcaaccactccaagttcccgggcaaytgaggcgccgtcctgctgctctgcccagtg

SEQ ID NO: 4568 - DNA, 61 bp, Homo Sapiens
gaaactgaaggctgaccaggacaagactcayttgggtcacacagtaaggcagaactagggg

SEQ ID NO: 4569 - DNA, 61 bp, Homo Sapiens
ctgctaggtctagcaggaagcagaggagccrggttagagtcccaaaacccatggggagtga

SEQ ID NO: 4570 - DNA, 61 bp, Homo Sapiens
gcagccgcaagccagagcccaggttgcccargccagagcagagatggcacaaatgccatca

SEQ ID NO: 4571 - DNA, 61 bp, Homo Sapiens
tattgggtgacaactctgtttcaggtactaygctagtctcttcccacaaggacctcacagc

SEQ ID NO: 4572 - DNA, 61 bp, Homo Sapiens
cctttgttgccactcaagtctagcagtcttmaatatttgtcgaatgagtgaatgaagtcaa

SEQ ID NO: 4573 - DNA, 61 bp, Homo Sapiens
ctcctctgtgggtatgtgcagtatctggcayatgaagggcactcaacaaccttgtttccct

SEQ ID NO: 4574 - DNA, 61 bp, Homo Sapiens
atctcctccaatggagtaggcagtggttttyttcaggcaagacacagaaagcaataaccat

SEQ ID NO: 4575 - DNA, 61 bp, Homo Sapiens
aacatgttagctttggagagcgatggctcaygtgcttgattcagctgctctgaggaaaatg

SEQ ID NO: 4576 - DNA, 61 bp, Homo Sapiens
cctcttacaactcagggagaaactataacaragaatcctagcagaaaagtcaaatccattc

SEQ ID NO: 4577 - DNA, 61 bp, Homo Sapiens
gaaaagtcaaatccattcctctggtttcctragtatcactgtggctgtctgcagaaccacc

SEQ ID NO: 4578 - DNA, 61 bp, Homo Sapiens
actggggaaagcagacaattaactgataacrtcactaaagtgtgacctgtgtcatctggag

SEQ ID NO: 4579 - DNA, 61 bp, Homo Sapiens
ggagttttctgaagctggcattctgaagcayagaaatctgctgaagccctgagaaagagct

SEQ ID NO: 4580 - DNA, 61 bp, Homo Sapiens
acatttttgttgttaatttacactaacattmtggcctaacaaaggatgcacaactttaaaa

SEQ ID NO: 4581 - DNA, 61 bp, Homo Sapiens
gcacagaactcacagctccactggctaaacygaatgaccactcatctgagccttccctccc

SEQ ID NO: 4582 - DNA, 61 bp, Homo Sapiens
aacatgggacttacagcatgagtatcattcrgccactaaacagtacacttcacgcatgaac

SEQ ID NO: 4583 - DNA, 61 bp, Homo Sapiens
ggacatgagaaaatgctcatgatcaaatggyaggagaacgaaactatatttacagtacgat

SEQ ID NO: 4584 - DNA, 61 bp, Homo Sapiens
ctgttcaatgtggccatttagaccacagagrgtttcctttcagggtttcagatatttttct

SEQ ID NO: 4585 - DNA, 61 bp, Homo Sapiens
cctgtgccggggccccatacctttctccacragctgcctccagcgccgggcccactcagtg

SEQ ID NO: 4586 - DNA, 61 bp, Homo Sapiens
tcccagcagtttctgccaccaagtgggtaaygaagacaatgtcgccaagggcaccgcagga

SEQ ID NO: 4587 - DNA, 61 bp, Homo Sapiens
atttgagagctatatatttaaatgcagtgcyaagggtttcatttaacacgaggaaaaaacc

SEQ ID NO: 4588 - DNA, 61 bp, Homo Sapiens
ctgatcaaaaccacacatcacatttcctagrtatgaggcctaggcccagctttctcacttg

SEQ ID NO: 4589 - DNA, 61 bp, Homo Sapiens
gcagcgcctggcagagccagtgcagtcagasgagccctgaagtgtgggcacaaaaacctgc

SEQ ID NO: 4590 - DNA, 61 bp, Homo Sapiens
gactccataaccttccaaagaagtgccttcrtttatttacagggcttaggaaaggaaaaaa

SEQ ID NO: 4591 - DNA, 61 bp, Homo Sapiens
agaaagtacaaacactggctatctattcccygctcacacacccagctttggcggcataagg

SEQ ID NO: 4592 - DNA, 61 bp, Homo Sapiens
cagtgagctggacaacatgttcgttcatctyaccaacgtcgccatccagaaacacggggtg

SEQ ID NO: 4593 - DNA, 61 bp, Homo Sapiens
actattacactgtttagcctttttcttcatytcattccattttttgctgttgttgagaata

SEQ ID NO: 4594 - DNA, 61 bp, Homo Sapiens
tgagcagcgccctttctgcagaaagtaaagmgcaccttgccgagagatcatttgtttctgt

SEQ ID NO: 4595 - DNA, 61 bp, Homo Sapiens
ccagtgagacgcagaaacggatcctttgtcygacttcctccagattgcctggggttggacc

SEQ ID NO: 4596 - DNA, 61 bp, Homo Sapiens
caaatgaggaaggccagtggaagcagactgyaggcaaacgacacctgcatgccaagccagg

SEQ ID NO: 4597 - DNA, 61 bp, Homo Sapiens
acgtcacactttgccaggaaactcgccttcraccaagaaggtccccagcaaagtaactcat

SEQ ID NO: 4598 - DNA, 61 bp, Homo Sapiens
gactcaactacttcctggatcttcctcacarcctcctgtggattcagcgttgcaaaattga

SEQ ID NO: 4599 - DNA, 61 bp, Homo Sapiens
gatttataccaatcttgcacatattttactycgaatttcacaaactcaattctctgctttc

SEQ ID NO: 4600 - DNA, 61 bp, Homo Sapiens
ttactataaggctacagtaatcatgacagtrgtactggttaaagaaaagacaagtagacca

SEQ ID NO: 4601 - DNA, 61 bp, Homo Sapiens
aaacagaggctcagggttcccagggaatccrtgactagagaccctgatgtgtgatggagcg

SEQ ID NO: 4602 - DNA, 61 bp, Homo Sapiens
atcacaaaaagagctcagatcatcttgtacyggcctctatgtttgaatggctgctgtctac

SEQ ID NO: 4603 - DNA, 61 bp, Homo Sapiens
ggaagcctcttggctgcagtctggacgtggytcttggcaatagggcactccacaccttgtg

SEQ ID NO: 4604 - DNA, 61 bp, Homo Sapiens
gccgaggtggggtctccagaggtggtactargaacaacagtgagctgaacaatgtccaatg

SEQ ID NO: 4605 - DNA, 61 bp, Homo Sapiens
tcttcagtgacgcagagtgatcttcagtgtrtctaaataactttgtgatgatgttttcctt

SEQ ID NO: 4606 - DNA, 61 bp, Homo Sapiens
atgttagaaattgcttccaattgattttagyggtggctttaagtccaaatctggatttaaa

SEQ ID NO: 4607 - DNA, 61 bp, Homo Sapiens
ttcacccctaaaaggatgctgaggctcggarggattgactgcactggatattctttgtctg

SEQ ID NO: 4608 - DNA, 61 bp, Homo Sapiens
tgaatataatctagacatatacaaccttccragactgaatcacgaagaaacagaaaatatt

SEQ ID NO: 4609 - DNA, 61 bp, Homo Sapiens
ttatgctaatctatttaaccatgagtcactyagccacatccttattttgttctcatgaaca

SEQ ID NO: 4610 - DNA, 61 bp, Homo Sapiens
taagaggaaatgaggaagagaagaaacttamatttgcagagctcacactgactggatgcag

SEQ ID NO: 4611 - DNA, 61 bp, Homo Sapiens
agaggaaaatgacatcacagtgttggaggarccatcaaagcccagaggaggatatggggtg

SEQ ID NO: 4612 - DNA, 61 bp, Homo Sapiens
aagacagggaagagatggacgctaaaatgcrgatataaaaatgttccgagggctgggcacg

SEQ ID NO: 4613 - DNA, 61 bp, Homo Sapiens
agaaaattaaaagcaagccatctacatacakttctaatcaaatatgaggattccagcattc

SEQ ID NO: 4614 - DNA, 61 bp, Homo Sapiens
taccatctccagctcttgaaaaactgctctmtaactcaacaaaaggagacaccaaatcaga

SEQ ID NO: 4615 - DNA, 61 bp, Homo Sapiens
agcagaagaaaggagcagttagccacagatyggtccacagagattacccaaactggaacaa

SEQ ID NO: 4616 - DNA, 61 bp, Homo Sapiens
ttattgacatgatatttggtagctcataaawtcatcaggaatactgcagattgagcctaga

SEQ ID NO: 4617 - DNA, 61 bp, Homo Sapiens
ggtatggcctaaaggccagcaggtcaacagrtttgactgccttgtacagaaggaaggaagg

What is claimed is:

1. A method of predicting a human patient's likely response to a treatment for schizophrenia (SZ), the method comprising determining the identity of an allele of at least one polymorphism listed in Tables 1-20, wherein the presence of an allele associated with a known response indicates the patient's likely response to the treatment.

2. A method of selecting a treatment for schizophrenia (SZ) for administration to a human patient, the method comprising:
determining the identity in the subject of an allele of at least one polymorphism listed in Tables 1-20;
comparing the identity of the allele in the subject to a reference allele of the same polymorphism, wherein the reference allele is associated with a known response to a treatment; and
selecting a treatment if the allele in the patient is the same as a reference allele that is associated with a positive response to that treatment.

3. The method of claim 1 or 2, wherein the treatment is administration of an antipsychotic medication, and the at least one polymorphism is selected from the markers listed in Tables 1-20.

4. The method of claim 3, wherein the antipsychotic medication is olanzapine, and the at least one polymorphism is selected from the markers listed in Tables 1, 6, 11, and 16.

5. The method of claim 4, wherein the at least one polymorphism is nucleotide 31 of a sequence selected from the group consisting of SEQ ID NO:2971, 2019, 684, 1109, 1336, 2256, 4414, 3296, 3298, 1853, 2390, 2813, 4603, 3746, 1309, 1588, 1197, 1717, and 248.

6. The method of claim 3, wherein the antipsychotic medication is risperidone, and the at least one polymorphism is selected from the markers listed in Tables 2, 7, 12, and 17.

7. The method of claim 6, wherein the at least one polymorphism is nucleotide 31 of a sequence selected from the group consisting of SEQ ID NO:27, 3878, 882, 882, 1439, 4213, 457, 2394, 1571, 4598, 559, 914, 4340, 1895, 22, 3078, 23, or 4573.

8. The method of claim 3, wherein the antipsychotic medication is quetiapine, and the at least one polymorphism is selected from the markers listed in Tables 3, 8, 13, and 18.

9. The method of claim 8, wherein the at least one polymorphism is nucleotide 31 of a sequence selected from the group consisting of SEQ ID NO:4571, 2383, 3737, 694, 795, 695, 2162, 574, 4414, 56, 1416, 1835, 3201, 2445, 1292, 1291, 745, 746, and 3528.

10. The method of claim 3, wherein the antipsychotic medication is perphenazine, and the at least one polymorphism is selected from the markers listed in Tables 4, 9, 14, and 19.

11. The method of claim 10, wherein the at least one polymorphism is nucleotide 31 of a sequence selected from the group consisting of SEQ ID NO:48, 3715, 2829, 3869, 2240, 4282 2409, 2634, 3312, 2797, 1665, 4250, 507, 3077, 3303, 1508, 307.

12. The method of claim 3, wherein the antipsychotic medication is ziprasidone, and the at least one polymorphism is selected from the markers listed in Tables 5, 10, 15, and 20.

13. The method of claim 12, wherein the at least one polymorphism is nucleotide 31 of a sequence selected from the group consisting of SEQ ID NO:3092, 3424, 62, 297, 2618, 1787 788, 1711, 4425, 2159, 3475, 1738, 2429, 2538, and 3589.

14. The method of claim 1 or 2, wherein determining the identity of an allele comprises obtaining a sample comprising DNA from the subject, and determining identity of the nucleotide at the polymorphic site.

15. The method of claim 14, wherein determining the identity of the nucleotide comprises contacting the sample with a probe specific for a selected allele of the polymorphism, and detecting the formation of complexes between the probe and the selected allele of the polymorphism, wherein the formation of complexes between the probe and the test marker indicates the presence of the selected allele in the sample.

16. The method of claim 14, wherein determining the identity of an allele comprises determining the identity of a nucleotide at position 31 of one of SEQ ID NOs: 1-4617.

17. The method of claim 1 or 2, further comprising selecting or excluding a subject for enrollment in a clinical trial based on the identity of the allele.

18. The method of claim 1 or 2, further comprising stratifying a subject population for analysis of a clinical trial based on the identity of the allele in the subjects.

19. The method of claim 2, further comprising administering the selected treatment to the subject.

20. The method of claim 1 or 2, wherein the response is selected from the group consisting of a change in a PANNS score; length of time until a discontinuation of therapy; likelihood of discontinuing therapy due to lack of efficacy; and likelihood of discontinuing therapy due to a serious adverse event.

21. The method of claim 2, wherein a positive response is a decrease in a PANNS score relative to baseline; a long time until discontinuation of therapy; a low likelihood of discontinuing therapy due to lack of efficacy; and a low likelihood of discontinuing therapy due to a serious adverse event.

22. The method of claim 1 or 2, further comprising recording the identity of the allele in a tangible medium.

23. The method of claim 1 or 2, wherein the tangible medium comprises a computer-readable disk, a solid state memory device, or an optical storage device.
